(19) United States
(12) Patent Application Publication
(10) Pub. No.: US 2023/0159496 A1
(43) Pub. Date: May 25, 2023

(54) COMPOUNDS AND METHODS FOR MODULATING SPLICING

(71) Applicant: REMIX THERAPEUTICS INC., Cambridge, MA (US)

(72) Inventors: Dominic Reynolds, Stoneham, MA (US); Serge Leger, Notre-Dame-de-l'Île-Perrot (CA); Michael W. Seiler, Belmont, MA (US); Anant A. Agrawal, Waltham, MA (US); Frederic Vaillancourt, Newton, MA (US); Peter Smith, Arlington, MA (US); Allen T. Hopper, Lexington, MA (US); Sudeep Prajapati, Somerville, MA (US); Olivier Soueidan, Vaudreuil-Dorion (CA)

(21) Appl. No.: 17/917,729

(22) PCT Filed: Apr. 8, 2021
(86) PCT No.: PCT/US2021/026481

§ 371 Date: Oct. 7, 2022

Related U.S. Application Data
(60) Provisional application No. 63/126,494, filed on Dec. 16, 2020.
(60) Provisional application No. 63/072,922, filed on Aug. 31, 2020.
(60) Provisional application No. 63/044,318, filed on Jun. 25, 2020.
(60) Provisional application No. 63/007,331, filed on Apr. 8, 2020.

(51) Int. Cl. C07D 401/14; C07D 471/04; C07D 519/00; C07D 403/14; C07D 487/04; C07D 471/08; C07D 413/14; C07D 417/14

(52) U.S. Cl. CPC C07D 401/14; C07D 471/04; C07D 519/00; C07D 403/14; C07D 487/04; C07D 471/08; C07D 413/14; C07D 417/14

(57) ABSTRACT

The present disclosure features compounds and related compositions that, inter alia, modulate nucleic acid splicing, e.g., splicing of a pre-mRNA, as well as methods of use thereof.

### CLAIM OF PRIORITY

[0001] This application claims priority to U.S. Application No. 63/007,331, filed Apr. 8, 2020; U.S. Application No. 63/044,318, filed Jun. 25, 2020; U.S. Application No. 63/072,922, filed Aug. 31, 2020; and U.S. Application No. 63/126,494, filed Dec. 16, 2020. The disclosure of each of the foregoing applications is incorporated herein by reference in its entirety.

### BACKGROUND

[0002] Alternative splicing is a major source of protein diversity in higher eukaryotes and is frequently regulated in a tissue-specific or development stage-specific manner. Disease associated alternative splicing patterns in pre-mRNAs are often mapped to changes in splice site signals or sequence motifs and regulatory splicing factors (Faustino and Cooper (2003), Genes Dev 17(4):419-37). Current therapies to modulate RNA expression involve oligonucleotide targeting and gene therapy; however, each of these modalities exhibit unique challenges as currently presented. As such, there is a need for new technologies to modulate RNA expression, including the development of small molecule compounds that target splicing.

### SUMMARY

[0003] The present disclosure features compounds and related compositions that, inter alia, modulate nucleic acid splicing, e.g., splicing of a pre-mRNA, as well as methods of use thereof. In an embodiment, the compounds described herein are compounds of Formulas (I), (III), or (V) and pharmaceutically acceptable salts, solvates, hydrates, tautomers, or stereoisomers thereof. The present disclosure additionally provides methods of using the compounds of the disclosure (e.g., compounds of Formulas (I), (III), or (V) and pharmaceutically acceptable salts, solvates, hydrates, tautomers, stereoisomers thereof), and compositions thereof, e.g., to target, and in embodiments bind or form a complex with, a nucleic acid (e.g., a pre-mRNA or nucleic acid component of a small nuclear ribonucleoprotein (snRNP) or spliceosome), a protein (e.g., a protein component of an snRNP or spliceosome, e.g., a member of the splicing machinery, e.g., one or more of the U1, U2, U4, U5, U6, U11, U12, U4atac, U6atac snRNPs), or a combination thereof. In another aspect, the compounds described herein may be used to alter the composition or structure of a nucleic acid (e.g., a pre-mRNA or mRNA (e.g., a pre-mRNA and the mRNA which arises from the pre-mRNA), e.g., by increasing or decreasing splicing at a splice site. In some embodiments, increasing or decreasing splicing results in modulating the level of a gene product (e.g., an RNA or protein) produced.

[0004] In another aspect, the compounds described herein may be used for the prevention and/or treatment of a disease, disorder, or condition, e.g., a disease, disorder or condition associated with splicing, e.g., alternative splicing. In some embodiments, the compounds described herein (e.g., compounds of Formulas (I), (III), or (V), and pharmaceutically acceptable salts, solvates, hydrates, tautomers, stereoisomers thereof) and compositions thereof are used for the prevention and/or treatment of a proliferative disease, disorder, or condition (e.g., a disease, disorder, or condition characterized by unwanted cell proliferation, e.g., a cancer or a benign neoplasm) in a subject. In some embodiments, the compounds described herein (e.g., compounds of Formulas (I), (III), or (V), and pharmaceutically acceptable salts, solvates, hydrates, tautomers, stereoisomers thereof) and compositions thereof are used for the prevention and/or treatment of a non-proliferative disease, disorder, or condition. In some embodiments, the compounds described herein (e.g., compounds of Formulas (I), (III), or (V), and pharmaceutically acceptable salts, solvates, hydrates, tautomers, stereoisomers thereof) and compositions thereof are used for the prevention and/or treatment of a neurological disease or disorder, an autoimmune disease or disorder, immunodeficiency disease or disorder, a lysosomal storage disease or disorder, a cardiovascular disease or disorder, a metabolic disease or disorder, a respiratory disease or disorder, a renal disease or disorder, or an infectious disease in a subject.

[0005] In one aspect, the present disclosure provides compounds of Formula (I):

[chemical structure]

or a pharmaceutically acceptable salt, solvate, hydrate, tautomer, or stereoisomer thereof, wherein each of A, B, L¹, L², W, X, Y, Z, R², and subvariables thereof are defined as described herein.

[0006] In another aspect, the present disclosure provides compounds of Formula (III):

[chemical structure]

or a pharmaceutically acceptable salt, solvate, hydrate, tautomer, or stereoisomer thereof, wherein each of A, B, L¹, L², X, Y, Z, R², R^{7a}, R^{7b}, and subvariables thereof are defined as described herein.

[0007] In another aspect, the present disclosure provides compounds of Formula (V):

[chemical structure]

or a pharmaceutically acceptable salt, solvate, hydrate, tautomer, or stereoisomer thereof, wherein each of A, R^{B}, L¹, L², Y, R², R³, m, n, and subvariables thereof are defined as described herein.

[0008] In another aspect, the present invention provides pharmaceutical compositions comprising a compound of Formulas (I), (III), or (V), or a pharmaceutically acceptable salt, solvate, hydrate, tautomer, or stereoisomer thereof, and optionally a pharmaceutically acceptable excipient. In an embodiment, the pharmaceutical compositions described herein include an effective amount (e.g., a therapeutically effective amount) of a compound of Formulas (I), (III), or (V), or a pharmaceutically acceptable salt, solvate, hydrate, tautomer, or stereoisomer thereof.

[0009] In another aspect, the present disclosure provides methods for modulating splicing, e.g., splicing of a nucleic acid (e.g., a DNA or RNA, e.g., a pre-mRNA) with a compound of Formulas (I), (III), or (V), or a pharmaceutically acceptable salt, solvate, hydrate, tautomer, or stereoisomer thereof. In another aspect, the present disclosure provides compositions for use in modulating splicing, e.g., splicing of a nucleic acid (e.g., a DNA or RNA, e.g., a pre-mRNA) with a compound of Formulas (I), (III), or (V), or a pharmaceutically acceptable salt, solvate, hydrate, tautomer, or stereoisomer thereof. Modulation of splicing may comprise impacting any step involved in splicing and may include an event upstream or downstream of a splicing event. For example, in some embodiments, the compound of Formulas (I), (III), or (V) binds to a target, e.g., a target nucleic acid (e.g., DNA or RNA, e.g., a precursor RNA, e.g., a pre-mRNA), a target protein, or combination thereof (e.g., an snRNP and a pre-mRNA). A target may include a splice site in a pre-mRNA or a component of the splicing machinery, such as the U1 snRNP. In some embodiments, the compound of Formulas (I), (III), or (V) alters a target nucleic acid (e.g., DNA or RNA, e.g., a precursor RNA, e.g., a pre-mRNA), target protein, or combination thereof. In some embodiments, the compound of Formulas (I), (III), or (V) increases or decreases splicing at a splice site on a target nucleic acid (e.g., an RNA, e.g., a precursor RNA, e.g., a pre-mRNA) by about 0.5% or more (e.g., about 1%, 2%, 3%, 4%, 5%, 10%, 20%, 30%, 40%, 50%, 75%, 90%, 95%, or more), relative to a reference (e.g., the absence of a compound of Formulas (I), (III), or (V), e.g., in a healthy or diseased cell or tissue). In some embodiments, the presence of a compound of Formulas (I), (III), or (V) results an increase or decrease of transcription of a target nucleic acid (e.g., an RNA) by about 0.5% or more (e.g., about 1%, 2%, 3%, 4%, 5%, 10%, 20%, 30%, 40%, 50%, 75%, 90%, 95%, or more), relative to a reference (e.g., the absence of a compound of Formulas (I), (III), or (V), e.g., in a healthy or diseased cell or tissue).

[0010] In another aspect, the present disclosure provides methods for preventing and/or treating a disease, disorder, or condition in a subject by administering a compound of Formulas (I), (III), or (V), or a pharmaceutically acceptable salt, solvate, hydrate, tautomer, or stereoisomer thereof, or related compositions. In some embodiments, the disease or disorder entails unwanted or aberrant splicing. In some embodiments, the disease or disorder is a proliferative disease, disorder, or condition. Exemplary proliferative diseases include cancer, a benign neoplasm, or angiogenesis. In other embodiments, the present disclosure provides methods for treating and/or preventing a non-proliferative disease, disorder, or condition. In still other embodiments, the present disclosure provides methods for treating and/or preventing a neurological disease or disorder, autoimmune disease or disorder, immunodeficiency disease or disorder, lysosomal storage disease or disorder, cardiovascular disease or disorder, metabolic disease or disorder, respiratory disease or disorder, renal disease or disorder, or infectious disease.

[0011] In another aspect, the present disclosure provides methods of down-regulating the expression of (e.g., the level of or the rate of production of) a target protein with a compound of Formulas (I), (III), or (V), or a pharmaceutically acceptable salt, solvate, hydrate, tautomer, or stereoisomer thereof in a biological sample or subject. In another aspect, the present disclosure provides methods of up-regulating the expression of (e.g., the level of or the rate of production of) a target protein with a compound of Formulas (I), (III), or (V), or a pharmaceutically acceptable salt, solvate, hydrate, tautomer, or stereoisomer thereof in a biological sample or subject. In another aspect, the present disclosure provides methods of altering the isoform of a target protein with a compound of Formulas (I), (III), or (V), or a pharmaceutically acceptable salt, solvate, hydrate, tautomer, or stereoisomer thereof in a biological sample or subject. Another aspect of the disclosure relates to methods of inhibiting the activity of a target protein in a biological sample or subject. In some embodiments, administration of a compound of Formulas (I), (III), or (V) to a biological sample, a cell, or a subject comprises inhibition of cell growth or induction of cell death.

[0012] In another aspect, the present disclosure provides compositions for use in preventing and/or treating a disease, disorder, or condition in a subject by administering a compound of Formulas (I), (III), or (V) or a pharmaceutically acceptable salt, solvate, hydrate, tautomer, or stereoisomer thereof, or related compositions. In some embodiments, the disease or disorder entails unwanted or aberrant splicing. In some embodiments, the disease or disorder is a proliferative disease, disorder, or condition. Exemplary proliferative diseases include cancer, a benign neoplasm, or angiogenesis. In other embodiments, the present disclosure provides methods for treating and/or preventing a non-proliferative disease, disorder, or condition. In still other embodiments, the present disclosure provides compositions for use in treating and/or preventing a neurological disease or disorder, autoimmune disease or disorder, immunodeficiency disease or disorder, lysosomal storage disease or disorder, cardiovascular disease or disorder, metabolic disease or disorder, respiratory disease or disorder, renal disease or disorder, or infectious disease.

[0013] In another aspect, the present disclosure provides compositions for use in down-regulating the expression of (e.g., the level of or the rate of production of) a target protein with a compound of Formulas (I), (III), or (V), or a pharmaceutically acceptable salt, solvate, hydrate, tautomer, or stereoisomer thereof in a biological sample or subject. In another aspect, the present disclosure provides compositions for use in up-regulating the expression of (e.g., the level of or the rate of production of) a target protein with a compound of Formulas (I), (III), or (V), or a pharmaceutically acceptable salt, solvate, hydrate, tautomer, or stereoisomer thereof in a biological sample or subject. In another aspect, the present disclosure provides compositions for use in altering the isoform of a target protein with a compound of Formulas (I), (III), or (V), or a pharmaceutically acceptable salt, solvate, hydrate, tautomer, or stereoisomer thereof in a biological sample or subject. Another aspect of the disclosure relates to compositions for use in inhibiting the activity of a target protein in a biological sample or subject. In some embodiments, administration of a compound of Formulas (I), (III), or (V) to a biological sample, a cell, or a subject comprises inhibition of cell growth or induction of cell death.

[0014] In another aspect, the present disclosure features kits comprising a container with a compound of Formulas (I), (III), or (V), or a pharmaceutically acceptable salt, solvate, hydrate, tautomer, stereoisomer thereof, or a pharmaceutical composition thereof. In certain embodiments, the kits described herein further include instructions for administering the compound of Formulas (I), (III), or (V), or the pharmaceutically acceptable salt, solvate, hydrate, tautomer, stereoisomer thereof, or the pharmaceutical composition thereof.

[0015] In any and all aspects of the present disclosure, in some embodiments, the compound, target nucleic acid (e.g., DNA, RNA, e.g., pre-mRNA), or target protein described herein is a compound, target nucleic acid (e.g., DNA, RNA, e.g., pre-mRNA), or target protein other than a compound, target nucleic acid (e.g., DNA, RNA, e.g., pre-mRNA), or target protein described one of U.S. Pat. No. 8,729,263, U.S. Publication No. 2015/0005289, WO 2014/028459, WO 2016/128343, WO 2016/196386, WO 2017/100726, WO 2018/232039, WO 2018/098446, WO 2019/028440, WO 2019/060917, WO 2019/199972, and WO 2020/004594. In some embodiments, the compound, target nucleic acid (e.g., DNA, RNA, e.g., pre-mRNA), or target protein described herein is a compound, target nucleic acid (e.g., DNA, RNA, e.g., pre-mRNA), or target protein described one of U.S. Pat. No. 8,729,263, U.S. Publication No. 2015/0005289, WO 2014/028459, WO 2016/128343, WO 2016/196386, WO 2017/100726, WO 2018/232039, WO 2018/098446, WO 2019/028440, WO 2019/060917, WO 2019/199972, and WO 2020/004594, each of which is incorporated herein by reference in its entirety.

[0016] The details of one or more embodiments of the invention are set forth herein. Other features, objects, and advantages of the invention will be apparent from the Detailed Description, the Examples, and the Claims.

### DETAILED DESCRIPTION

### Selected Chemical Definitions

[0017] Definitions of specific functional groups and chemical terms are described in more detail below. The chemical elements are identified in accordance with the Periodic Table of the Elements, CAS version, Handbook of Chemistry and Physics, 75^{th} Ed., inside cover, and specific functional groups are generally defined as described therein. Additionally, general principles of organic chemistry, as well as specific functional moieties and reactivity, are described in Thomas Sorrell, Organic Chemistry, University Science Books, Sausalito, 1999; Smith and March, March's Advanced Organic Chemistry, 5^{th} Edition, John Wiley & Sons, Inc., New York, 2001; Larock, Comprehensive Organic Transformations, VCH Publishers, Inc., New York, 1989; and Carruthers, Some Modern Methods of Organic Synthesis, 3^{rd} Edition, Cambridge University Press, Cambridge, 1987.

[0018] The abbreviations used herein have their conventional meaning within the chemical and biological arts. The chemical structures and formulae set forth herein are constructed according to the standard rules of chemical valency known in the chemical arts.

[0019] When a range of values is listed, it is intended to encompass each value and sub—range within the range. For example “C₁-C₆ alkyl” is intended to encompass, C₁, C₂, C₃, C₄, C₅, C₆, C₁-C₆, C₁-C₄, C₁-C₃, C₁-C₂, C₂-C₆, C₂-C₄, C₂-C₃, C₃-C₆, C₃-C₄, C₄-C₆, C₄-C₅, and C₅-C₆ alkyl.

[0020] The following terms are intended to have the meanings presented therewith below and are useful in understanding the description and intended scope of the present invention.

[0021] As used herein, “alkyl” refers to a radical of a straight—chain or branched saturated hydrocarbon group having from 1 to 24 carbon atoms (“C₁-C₂₄ alkyl”). In some embodiments, an alkyl group has 1 to 12 carbon atoms (“C₁-C₁₂ alkyl”). In some embodiments, an alkyl group has 1 to 8 carbon atoms (“C₁-C₈ alkyl”). In some embodiments, an alkyl group has 1 to 6 carbon atoms (“C₁-C₆ alkyl”). In some embodiments, an alkyl group has 2 to 6 carbon atoms (“C₂-C₆ alkyl”). In some embodiments, an alkyl group has 1 carbon atom (“C₁ alkyl”). Examples of C₁-C₆alkyl groups include methyl (C₁), ethyl (C₂), n-propyl (C₃), isopropyl (C₃), n-butyl (C₄), tert-butyl (C₄), sec-butyl (C₄), iso-butyl (C₄), n-pentyl (C₅), 3-pentanyl (C₅), amyl (C₅), neopentyl (C₅), 3-methyl-2-butanyl (C₅), tertiary amyl (C₅), and n-hexyl (C₆). Additional examples of alkyl groups include n-heptyl (C₇), n-octyl (C₈) and the like. Each instance of an alkyl group may be independently optionally substituted, i.e., unsubstituted (an “unsubstituted alkyl”) or substituted (a “substituted alkyl”) with one or more substituents; e.g., for instance from 1 to 5 substituents, 1 to 3 substituents, or 1 substituent. In certain embodiments, the alkyl group is unsubstituted C₁-C₁₀ alkyl (e.g., —CH₃). In certain embodiments, the alkyl group is substituted C₁-C₆ alkyl.

[0022] As used herein, “alkenyl” refers to a radical of a straight—chain or branched hydrocarbon group having from 2 to 24 carbon atoms, one or more carbon-carbon double bonds, and no triple bonds (“C₂-C₂₄ alkenyl”). In some embodiments, an alkenyl group has 2 to 10 carbon atoms (“C₂-C₁₀ alkenyl”). In some embodiments, an alkenyl group has 2 to 8 carbon atoms (“C₂-C₈ alkenyl”). In some embodiments, an alkenyl group has 2 to 6 carbon atoms (“C₂-C₆ alkenyl”). In some embodiments, an alkenyl group has 2 carbon atoms (“C₂ alkenyl”). The one or more carbon-carbon double bonds can be internal (such as in 2-butenyl) or terminal (such as in 1-butenyl). Examples of C₂-C₄ alkenyl groups include ethenyl (C₂), 1-propenyl (C₃), 2-propenyl (C₃), 1-butenyl (C₄), 2-butenyl (C₄), butadienyl (C₄), and the like. Examples of C₂-C₆ alkenyl groups include the aforementioned C₂-C₄ alkenyl groups as well as pentenyl (C₅), pentadienyl (C₅), hexenyl (C₆), and the like. Additional examples of alkenyl include heptenyl (C₇), octenyl (C₈), octatrienyl (C₈), and the like. Each instance of an alkenyl group may be independently optionally substituted, i.e., unsubstituted (an “unsubstituted alkenyl”) or substituted (a “substituted alkenyl”) with one or more substituents e.g., for instance from 1 to 5 substituents, 1 to 3 substituents, or 1 substituent. In certain embodiments, the alkenyl group is unsubstituted C₁-C₁₀ alkenyl. In certain embodiments, the alkenyl group is substituted C₂-C₆ alkenyl.

[0023] As used herein, the term “alkynyl” refers to a radical of a straight—chain or branched hydrocarbon group having from 2 to 24 carbon atoms, one or more carbon-carbon triple bonds (“C₂-C₂₄ alkenyl”). In some embodiments, an alkynyl group has 2 to 10 carbon atoms (“C₂-C₁₀ alkynyl”). In some embodiments, an alkynyl group has 2 to 8 carbon atoms (“C₂-C₈ alkynyl”). In some embodiments, an alkynyl group has 2 to 6 carbon atoms (“C₂-C₆ alkynyl”). In some embodiments, an alkynyl group has 2 carbon atoms (“C₂ alkynyl”). The one or more carbon-carbon triple bonds can be internal (such as in 2-butynyl) or terminal (such as in 1-butynyl). Examples of C₂-C₄ alkynyl groups include ethynyl (C₂), 1-propynyl (C₃), 2-propynyl (C₃), 1-butynyl (C₄), 2-butynyl (C₄), and the like. Each instance of an alkynyl group may be independently optionally substituted, i.e., unsubstituted (an “unsubstituted alkynyl”) or substituted (a “substituted alkynyl”) with one or more substituents e.g., for instance from 1 to 5 substituents, 1 to 3 substituents, or 1 substituent. In certain embodiments, the alkynyl group is unsubstituted C₂₋₁₀ alkynyl. In certain embodiments, the alkynyl group is substituted C₂₋₆ alkynyl.

[0024] As used herein, the term “haloalkyl,” refers to a non-cyclic stable straight or branched chain, or combinations thereof, including at least one carbon atom and at least one halogen selected from the group consisting of F, Cl, Br, and I. The halogen(s) F, Cl, Br, and I may be placed at any position of the haloalkyl group. Exemplary haloalkyl groups include, but are not limited to: —CF₃, —CCl₃, —CH₂—CF₃, —CH₂—CCl₃, —CH₂—CBr3, —CH₂—Cl₃, —CH₂—CH₂—CH(CF₃)—CH₃, —CH₂—CH₂—CH(Br)—CH₃, and —CH₂—CH═CH—CH₂—CF₃. Each instance of a haloalkyl group may be independently optionally substituted, i.e., unsubstituted (an “unsubstituted haloalkyl”) or substituted (a “substituted haloalkyl”) with one or more substituents e.g., for instance from 1 to 5 substituents, 1 to 3 substituents, or 1 substituent.

[0025] As used herein, the term “heteroalkyl,” refers to a non-cyclic stable straight or branched chain, or combinations thereof, including at least one carbon atom and at least one heteroatom selected from the group consisting of O, N, P, Si, and S, and wherein the nitrogen and sulfur atoms may optionally be oxidized, and the nitrogen heteroatom may optionally be quaternized. The heteroatom(s) O, N, P, S, and Si may be placed at any position of the heteroalkyl group. Exemplary heteroalkyl groups include, but are not limited to: —CH₂—CH₂—O—CH₃, —CH₂—CH₂—NH—CH₃, —CH₂—CH₂—N(CH₃)—CH₃, —CH₂—S—CH₂—CH₃, —CH₂—CH₂, —S(O)—CH₃, —CH₂—CH₂—S(O)₂—CH₃, —CH═CH—O—CH₃, —Si(CH₃)₃, —CH₂—CH═N—OCH₃, —CH═CH—N(CH₃)—CH₃, —O—CH₃, and —O—CH₂—CH₃. Up to two or three heteroatoms may be consecutive, such as, for example, —CH₂—NH—OCH₃ and —CH₂—O—Si(CH₃)₃. Where “heteroalkyl” is recited, followed by recitations of specific heteroalkyl groups, such as —CH₂O, —NR^{C}R^{D}, or the like, it will be understood that the terms heteroalkyl and —CH₂O or —NR^{C}R^{D} are not redundant or mutually exclusive. Rather, the specific heteroalkyl groups are recited to add clarity. Thus, the term “heteroalkyl” should not be interpreted herein as excluding specific heteroalkyl groups, such as —CH₂O, —NR^{C}R^{D}, or the like. Each instance of a heteroalkyl group may be independently optionally substituted, i.e., unsubstituted (an “unsubstituted heteroalkyl”) or substituted (a “substituted heteroalkyl”) with one or more substituents e.g., for instance from 1 to 5 substituents, 1 to 3 substituents, or 1 substituent.

[0026] As used herein, “aryl” refers to a radical of a monocyclic or polycyclic (e.g., bicyclic or tricyclic) 4n+2 aromatic ring system (e.g., having 6, 10, or 14 π electrons shared in a cyclic array) having 6-14 ring carbon atoms and zero heteroatoms provided in the aromatic ring system (“C₆-C₁₄ aryl”). In some embodiments, an aryl group has six ring carbon atoms (“C₆ aryl”; e.g., phenyl). In some embodiments, an aryl group has ten ring carbon atoms (“C₁₀ aryl”; e.g., naphthyl such as 1-naphthyl and 2-naphthyl). In some embodiments, an aryl group has fourteen ring carbon atoms (“C₁₄ aryl”; e.g., anthracyl). An aryl group may be described as, e.g., a C₆-C₁₀-membered aryl, wherein the term “membered” refers to the non-hydrogen ring atoms within the moiety. Aryl groups include phenyl, naphthyl, indenyl, and tetrahydronaphthyl. Each instance of an aryl group may be independently optionally substituted, i.e., unsubstituted (an “unsubstituted aryl”) or substituted (a “substituted aryl”) with one or more substituents. In certain embodiments, the aryl group is unsubstituted C₆-C₁₄ aryl. In certain embodiments, the aryl group is substituted C₆-C₁₄ aryl.

[0027] As used herein, “heteroaryl” refers to a radical of a 5-10 membered monocyclic or bicyclic 4n+2 aromatic ring system (e.g., having 6 or 10 π C electrons shared in a cyclic array) having ring carbon atoms and 1-4 ring heteroatoms provided in the aromatic ring system, wherein each heteroatom is independently selected from nitrogen, oxygen and sulfur (“5-10 membered heteroaryl”). In heteroaryl groups that contain one or more nitrogen atoms, the point of attachment can be a carbon or nitrogen atom, as valency permits. Heteroaryl bicyclic ring systems can include one or more heteroatoms in one or both rings. “Heteroaryl” also includes ring systems wherein the heteroaryl ring, as defined above, is fused with one or more aryl groups wherein the point of attachment is either on the aryl or heteroaryl ring, and in such instances, the number of ring members designates the number of ring members in the fused (aryl/heteroaryl) ring system. Bicyclic heteroaryl groups wherein one ring does not contain a heteroatom (e.g., indolyl, quinolinyl, carbazolyl, and the like) the point of attachment can be on either ring, i.e., either the ring bearing a heteroatom (e.g., 2-indolyl) or the ring that does not contain a heteroatom (e.g., 5-indolyl). A heteroaryl group may be described as, e.g., a 6-10-membered heteroaryl, wherein the term “membered” refers to the non-hydrogen ring atoms within the moiety. Each instance of a heteroaryl group may be independently optionally substituted, i.e., unsubstituted (an “unsubstituted heteroaryl”) or substituted (a “substituted heteroaryl”) with one or more substituents e.g., for instance from 1 to 5 substituents, 1 to 3 substituents, or 1 substituent.

[0028] Exemplary 5-membered heteroaryl groups containing one heteroatom include, without limitation, pyrrolyl, furanyl and thiophenyl. Exemplary 5-membered heteroaryl groups containing two heteroatoms include, without limitation, imidazolyl, pyrazolyl, oxazolyl, isoxazolyl, thiazolyl, and isothiazolyl. Exemplary 5-membered heteroaryl groups containing three heteroatoms include, without limitation, triazolyl, oxadiazolyl, and thiadiazolyl. Exemplary 5-membered heteroaryl groups containing four heteroatoms include, without limitation, tetrazolyl. Exemplary 6-membered heteroaryl groups containing one heteroatom include, without limitation, pyridinyl. Exemplary 6-membered heteroaryl groups containing two heteroatoms include, without limitation, pyridazinyl, pyrimidinyl, and pyrazinyl. Exemplary 6-membered heteroaryl groups containing three or four heteroatoms include, without limitation, triazinyl and tetrazinyl, respectively. Exemplary 7-membered heteroaryl groups containing one heteroatom include, without limitation, azepinyl, oxepinyl, and thiepinyl. Exemplary 5,6-bicyclic heteroaryl groups include, without limitation, indolyl, isoindolyl, indazolyl, benzotriazolyl, benzothiophenyl, isobenzothiophenyl, benzofuranyl, benzoisofuranyl, benzimidazolyl, benzoxazolyl, benzisoxazolyl, benzoxadiazolyl, benzthiazolyl, benzisothiazolyl, benzthiadiazolyl, indolizinyl, and purinyl. Exemplary 6,6-bicyclic heteroaryl groups include, without limitation, naphthyridinyl, pteridinyl, quinolinyl, isoquinolinyl, cinnolinyl, quinoxalinyl, phthalazinyl, and quinazolinyl. Other exemplary heteroaryl groups include heme and heme derivatives.

[0029] As used herein, “cycloalkyl” refers to a radical of a non-aromatic cyclic hydrocarbon group having from 3 to 10 ring carbon atoms (“C₃-C₁₀ cycloalkyl”) and zero heteroatoms in the non-aromatic ring system. In some embodiments, a cycloalkyl group has 3 to 8 ring carbon atoms (“C₃-C₈ cycloalkyl”). In some embodiments, a cycloalkyl group has 3 to 6 ring carbon atoms (“C₃-C₆ cycloalkyl”). In some embodiments, a cycloalkyl group has 3 to 6 ring carbon atoms (“C₃-C₆ cycloalkyl”). In some embodiments, a cycloalkyl group has 5 to 10 ring carbon atoms (“C₅-C₁₀ cycloalkyl”). A cycloalkyl group may be described as, e.g., a C₄-C₇-membered cycloalkyl, wherein the term “membered” refers to the non-hydrogen ring atoms within the moiety. Exemplary C₃-C₆ cycloalkyl groups include, without limitation, cyclopropyl (C₃), cyclopropenyl (C₃), cyclobutyl (C₄), cyclobutenyl (C₄), cyclopentyl (C₅), cyclopentenyl (C₅), cyclohexyl (C₆), cyclohexenyl (C₆), cyclohexadienyl (C₆), and the like. Exemplary C₃-C₈ cycloalkyl groups include, without limitation, the aforementioned C₃-C₆ cycloalkyl groups as well as cycloheptyl (C₇), cycloheptenyl (C₇), cycloheptadienyl (C₇), cycloheptatrienyl (C₇), cyclooctyl (C₈), cyclooctenyl (C₈), cubanyl (C₈), bicyclo[1.1.1]pentanyl (C₅), bicyclo[2.2.2]octanyl (C₈), bicyclo[2.1.1]hexanyl (C₆), bicyclo[3.1.1]heptanyl (C₇), and the like. Exemplary C₃-C₁₀ cycloalkyl groups include, without limitation, the aforementioned C₃-C₈ cycloalkyl groups as well as cyclononyl (C₉), cyclononenyl (C₉), cyclodecyl (C₁₀), cyclodecenyl (C₁₀), octahydro-1H—indenyl (C₉), decahydronaphthalenyl (C₁₀), spiro[4.5]decanyl (C₁₀), and the like. As the foregoing examples illustrate, in certain embodiments, the cycloalkyl group is either monocyclic (“monocyclic cycloalkyl”) or contain a fused, bridged or spiro ring system such as a bicyclic system (“bicyclic cycloalkyl”) and can be saturated or can be partially unsaturated. “Cycloalkyl” also includes ring systems wherein the cycloalkyl ring, as defined above, is fused with one or more aryl groups wherein the point of attachment is on the cycloalkyl ring, and in such instances, the number of carbons continue to designate the number of carbons in the cycloalkyl ring system. Each instance of a cycloalkyl group may be independently optionally substituted, i.e., unsubstituted (an “unsubstituted cycloalkyl”) or substituted (a “substituted cycloalkyl”) with one or more substituents. In certain embodiments, the cycloalkyl group is unsubstituted C₃-C₁₀ cycloalkyl. In certain embodiments, the cycloalkyl group is a substituted C₃-C₁₀ cycloalkyl.

[0030] “Heterocyclyl” as used herein refers to a radical of a 3— to 10-membered non-aromatic ring system having ring carbon atoms and 1 to 4 ring heteroatoms, wherein each heteroatom is independently selected from nitrogen, oxygen, sulfur, boron, phosphorus, and silicon (“3-10 membered heterocyclyl”). In heterocyclyl groups that contain one or more nitrogen atoms, the point of attachment can be a carbon or nitrogen atom, as valency permits. A heterocyclyl group can either be monocyclic (“monocyclic heterocyclyl”) or a fused, bridged or spiro ring system such as a bicyclic system (“bicyclic heterocyclyl”), and can be saturated or can be partially unsaturated. Heterocyclyl bicyclic ring systems can include one or more heteroatoms in one or both rings. “Heterocyclyl” also includes ring systems wherein the heterocyclyl ring, as defined above, is fused with one or more cycloalkyl groups wherein the point of attachment is either on the cycloalkyl or heterocyclyl ring, or ring systems wherein the heterocyclyl ring, as defined above, is fused with one or more aryl or heteroaryl groups, wherein the point of attachment is on the heterocyclyl ring, and in such instances, the number of ring members continue to designate the number of ring members in the heterocyclyl ring system. A heterocyclyl group may be described as, e.g., a 3-7-membered heterocyclyl, wherein the term “membered” refers to the non-hydrogen ring atoms, i.e., carbon, nitrogen, oxygen, sulfur, boron, phosphorus, and silicon, within the moiety. Each instance of heterocyclyl may be independently optionally substituted, i.e., unsubstituted (an “unsubstituted heterocyclyl”) or substituted (a “substituted heterocyclyl”) with one or more substituents. In certain embodiments, the heterocyclyl group is unsubstituted 3-10 membered heterocyclyl. In certain embodiments, the heterocyclyl group is substituted 3-10 membered heterocyclyl.

[0031] Exemplary 3-membered heterocyclyl groups containing one heteroatom include, without limitation, azirdinyl, oxiranyl, thiorenyl. Exemplary 4-membered heterocyclyl groups containing one heteroatom include, without limitation, azetidinyl, oxetanyl and thietanyl. Exemplary 5-membered heterocyclyl groups containing one heteroatom include, without limitation, tetrahydrofuranyl, dihydrofuranyl, tetrahydrothiophenyl, dihydrothiophenyl, pyrrolidinyl, dihydropyrrolyl and pyrrolyl-2,5-dione. Exemplary 5-membered heterocyclyl groups containing two heteroatoms include, without limitation, dioxolanyl, oxasulfuranyl, disulfuranyl, and oxazolidin-2-one. Exemplary 5-membered heterocyclyl groups containing three heteroatoms include, without limitation, triazolinyl, oxadiazolinyl, and thiadiazolinyl. Exemplary 6-membered heterocyclyl groups containing one heteroatom include, without limitation, piperidinyl (e.g., 2,2,6,6-tetramethylpiperidinyl), tetrahydropyranyl, dihydropyridinyl, pyridinonyl (e.g., 1-methylpyridin2-onyl), and thianyl. Exemplary 6-membered heterocyclyl groups containing two heteroatoms include, without limitation, piperazinyl, morpholinyl, pyridazinonyl (2-methylpyridazin-3-onyl), pyrimidinonyl (e.g., 1-methylpyrimidin-2-onyl, 3-methylpyrimidin-4-onyl), dithianyl, dioxanyl. Exemplary 6-membered heterocyclyl groups containing two heteroatoms include, without limitation, triazinanyl. Exemplary 7-membered heterocyclyl groups containing one heteroatom include, without limitation, azepanyl, oxepanyl and thiepanyl. Exemplary 8-membered heterocyclyl groups containing one heteroatom include, without limitation, azocanyl, oxecanyl and thiocanyl. Exemplary 5-membered heterocyclyl groups fused to a C₆ aryl ring (also referred to herein as a 5,6-bicyclic heterocyclyl ring) include, without limitation, indolinyl, isoindolinyl, dihydrobenzofuranyl, dihydrobenzothienyl, benzoxazolinonyl, and the like. Exemplary 5-membered heterocyclyl groups fused to a heterocyclyl ring (also referred to herein as a 5,5-bicyclic heterocyclyl ring) include, without limitation, octahydropyrrolopyrrolyl (e.g., octahydropyrrolo[3,4-c]pyrrolyl), and the like. Exemplary 6-membered heterocyclyl groups fused to a heterocyclyl ring (also referred to as a 4,6-membered heterocyclyl ring) include, without limitation, diazaspirononanyl (e.g., 2,7-diazaspiro[3.5]nonanyl). Exemplary 6-membered heterocyclyl groups fused to an aryl ring (also referred to herein as a 6,6-bicyclic heterocyclyl ring) include, without limitation, tetrahydroquinolinyl, tetrahydroisoquinolinyl, and the like. Exemplary 6-membered heterocyclyl groups fused to a cycloalkyl ring (also referred to herein as a 6,7-bicyclic heterocyclyl ring) include, without limitation, azabicyclooctanyl (e.g., (1,5)-8-azabicyclo[3.2.1]octanyl). Exemplary 6-membered heterocyclyl groups fused to a cycloalkyl ring (also referred to herein as a 6,8-bicyclic heterocyclyl ring) include, without limitation, azabicyclononanyl (e.g., 9-azabicyclo[3.3.1]nonanyl).

[0032] The terms “alkylene,” “alkenylene,” “alkynylene,” “haloalkylene,” “heteroalkylene,” “cycloalkylene,” or “heterocyclylene,” alone or as part of another substituent, mean, unless otherwise stated, a divalent radical derived from an alkyl, alkenyl, alkynyl, haloalkylene, heteroalkylene, cycloalkyl, or heterocyclyl respectively. For example, the term “alkenylene,” by itself or as part of another substituent, means, unless otherwise stated, a divalent radical derived from an alkene. An alkylene, alkenylene, alkynylene, haloalkylene, heteroalkylene, cycloalkylene, or heterocyclylene group may be described as, e.g., a C₁-C₆-membered alkylene, C₂-C₆-membered alkenylene, C₂-C₆-membered alkynylene, C₁-C₆-membered haloalkylene, C₁-C₆-membered heteroalkylene, C₃-C₈-membered cycloalkylene, or C₃-C₈-membered heterocyclylene, wherein the term “membered” refers to the non-hydrogen atoms within the moiety. In the case of heteroalkylene and heterocyclylene groups, heteroatoms can also occupy either or both of the chain termini (e.g., alkyleneoxy, alkylenedioxy, alkyleneamino, alkylenediamino, and the like). Still further, no orientation of the linking group is implied by the direction in which the formula of the linking group is written. For example, the formula -C(O)₂R¹— may represent both —C(O)₂R¹— and —R¹C(O)₂—.

[0033] As used herein, the terms “cyano” or “—CN” refer to a substituent having a carbon atom joined to a nitrogen atom by a triple bond, e.g., C≡N.

[0034] As used herein, the terms “halogen” or “halo” refer to fluorine, chlorine, bromine or iodine.

[0035] As used herein, the term “hydroxy” refers to —OH.

[0036] As used herein, the term “nitro” refers to a substitutent having two oxygen atoms bound to a nitrogen atom, e.g., —NO₂.

[0037] As used herein, the term “nucleobase” as used herein, is a nitrogen-containing biological compounds found linked to a sugar within a nucleoside—the basic building blocks of deoxyribonucleic acid (DNA) and ribonucleic acid (RNA). The primary, or naturally occurring, nucleobases are cytosine (DNA and RNA), guanine (DNA and RNA), adenine (DNA and RNA), thymine (DNA) and uracil (RNA), abbreviated as C, G, A, T, and U, respectively. Because A, G, C, and T appear in the DNA, these molecules are called DNA-bases; A, G, C, and U are called RNA-bases. Adenine and guanine belong to the double-ringed class of molecules called purines (abbreviated as R). Cytosine, thymine, and uracil are all pyrimidines. Other nucleobases that do not function as normal parts of the genetic code, are termed non-naturally occurring. In an embodiment, a nucleobase may be chemically modified, for example, with an alkyl (e.g., methyl), halo, -O-alkyl, or other modification.

[0038] As used herein, the term “nucleic acid” refers to deoxyribonucleic acids (DNA) or ribonucleic acids (RNA) and polymers thereof in either single- or double-stranded form. The term “nucleic acid” includes a gene, cDNA, pre-mRNA, or an mRNA. In one embodiment, the nucleic acid molecule is synthetic (e.g., chemically synthesized) or recombinant. Unless specifically limited, the term encompasses nucleic acids containing analogues or derivatives of natural nucleotides that have similar binding properties as the reference nucleic acid and are metabolized in a manner similar to naturally occurring nucleotides. Unless otherwise indicated, a particular nucleic acid sequence also implicitly encompasses conservatively modified variants thereof (e.g., degenerate codon substitutions), alleles, orthologs, SNPs, and complementarity sequences as well as the sequence explicitly indicated.

[0039] As used herein, “oxo” refers to a carbonyl, i.e., —C(O)—.

[0040] The symbol “ [symbol] ” as used herein in relation to a compound of Formula (I) refers to an attachment point to another moiety or functional group within the compound.

[0041] Alkyl, alkenyl, alkynyl, haloalkyl, heteroalkyl, cycloalkyl, heterocyclyl, aryl, and heteroaryl groups, as defined herein, are optionally substituted. In general, the term “substituted”, whether preceded by the term “optionally” or not, means that at least one hydrogen present on a group (e.g., a carbon or nitrogen atom) is replaced with a permissible substituent, e.g., a substituent which upon substitution results in a stable compound, e.g., a compound which does not spontaneously undergo transformation such as by rearrangement, cyclization, elimination, or other reaction. Unless otherwise indicated, a “substituted” group has a substituent at one or more substitutable positions of the group, and when more than one position in any given structure is substituted, the substituent is either the same or different at each position. The term “substituted” is contemplated to include substitution with all permissible substituents of organic compounds, such as any of the substituents described herein that result in the formation of a stable compound. The present disclosure contemplates any and all such combinations in order to arrive at a stable compound. For purposes of this invention, heteroatoms such as nitrogen may have hydrogen substituents and/or any suitable substituent as described herein which satisfy the valencies of the heteroatoms and results in the formation of a stable moiety.

[0042] Two or more substituents may optionally be joined to form aryl, heteroaryl, cycloalkyl, or heterocyclyl groups. Such so-called ring-forming substituents are typically, though not necessarily, found attached to a cyclic base structure. In one embodiment, the ring-forming substituents are attached to adjacent members of the base structure. For example, two ring-forming substituents attached to adjacent members of a cyclic base structure create a fused ring structure. In another embodiment, the ring-forming substituents are attached to a single member of the base structure. For example, two ring-forming substituents attached to a single member of a cyclic base structure create a spirocyclic structure. In yet another embodiment, the ring-forming substituents are attached to non-adjacent members of the base structure.

[0043] The compounds provided herein may exist in one or more particular geometric, optical, enantiomeric, diasteriomeric, epimeric, stereoisomeric, tautomeric, conformational, or anomeric forms, including but not limited to: cis- and trans-forms; E- and Z-forms; endo- and exo-forms; R-, S-, and meso-forms; D- and L-forms; d- and 1-forms; (+) and (−) forms; keto-, enol-, and enolate-forms; syn- and anti-forms; synclinal- and anticlinal-forms; α- and β-forms; axial and equatorial forms; boat-, chair-, twist-, envelope-, and half chair-forms; and combinations thereof, hereinafter collectively referred to as “isomers” (or “isomeric forms”).

[0044] Compounds described herein can comprise one or more asymmetric centers, and thus can exist in various isomeric forms, e.g., enantiomers and/or diastereomers. For example, the compounds described herein can be in the form of an individual enantiomer, diastereomer or geometric isomer, or can be in the form of a mixture of stereoisomers, including racemic mixtures and mixtures enriched in one or more stereoisomer. In an embodiment, the stereochemistry depicted in a compound is relative rather than absolute. Isomers can be isolated from mixtures by methods known to those skilled in the art, including chiral high-pressure liquid chromatography (HPLC) and the formation and crystallization of chiral salts; or preferred isomers can be prepared by asymmetric syntheses. See, for example, Jacques et al., Enantiomers, Racemates and Resolutions (Wiley Interscience, New York, 1981); Wilen et al., Tetrahedron 33:2725 (1977); Eliel, Stereochemistry of Carbon Compounds (McGraw-Hill, NY, 1962); and Wilen, Tables of Resolving Agents and Optical Resolutions p. 268 (E.L. Eliel, Ed., Univ. of Notre Dame Press, Notre Dame, Ind. 1972). This disclosure additionally encompasses compounds described herein as individual isomers substantially free of other isomers, and alternatively, as mixtures of various isomers.

[0045] As used herein, a pure enantiomeric compound is substantially free from other enantiomers or stereoisomers of the compound (i.e., in enantiomeric excess). In other words, an “S” form of the compound is substantially free from the “R” form of the compound and is, thus, in enantiomeric excess of the “R” form. The term “enantiomerically pure” or “pure enantiomer” denotes that the compound comprises more than 75% by weight, more than 80% by weight, more than 85% by weight, more than 90% by weight, more than 91% by weight, more than 92% by weight, more than 93% by weight, more than 94% by weight, more than 95% by weight, more than 96% by weight, more than 97% by weight, more than 98% by weight, more than 99% by weight, more than 99.5% by weight, or more than 99.9% by weight, of the enantiomer. In certain embodiments, the weights are based upon total weight of all enantiomers or stereoisomers of the compound.

[0046] In the compositions provided herein, an enantiomerically pure compound can be present with other active or inactive ingredients. For example, a pharmaceutical composition comprising an enantiomerically pure R—compound can comprise, for example, about 90% excipient and about 10% enantiomerically pure R—compound. In certain embodiments, the enantiomerically pure R—compound in such compositions can, for example, comprise, at least about 95% by weight R—compound and at most about 5% by weight S—compound, by total weight of the compound. For example, a pharmaceutical composition comprising an enantiomerically pure S— compound can comprise, for example, about 90% excipient and about 10% enantiomerically pure S—compound. In certain embodiments, the enantiomerically pure S—compound in such compositions can, for example, comprise, at least about 95% by weight S—compound and at most about 5% by weight R—compound, by total weight of the compound.

[0047] In some embodiments, a diastereomerically pure compound can be present with other active or inactive ingredients. For example, a pharmaceutical composition comprising a diastereometerically pure exo compound can comprise, for example, about 90% excipient and about 10% diastereometerically pure exo compound. In certain embodiments, the diastereometerically pure exo compound in such compositions can, for example, comprise, at least about 95% by weight exo compound and at most about 5% by weight endo compound, by total weight of the compound. For example, a pharmaceutical composition comprising a diastereometerically pure endo compound can comprise, for example, about 90% excipient and about 10% diastereometerically pure endo compound. In certain embodiments, the diastereometerically pure endo compound in such compositions can, for example, comprise, at least about 95% by weight endo compound and at most about 5% by weight exo compound, by total weight of the compound.

[0048] In some embodiments, an isomerically pure compound can be present with other active or inactive ingredients. For example, a pharmaceutical composition comprising a isomerically pure exo compound can comprise, for example, about 90% excipient and about 10% isomerically pure exo compound. In certain embodiments, the isomerically pure exo compound in such compositions can, for example, comprise, at least about 95% by weight exo compound and at most about 5% by weight endo compound, by total weight of the compound. For example, a pharmaceutical composition comprising an isomerically pure endo compound can comprise, for example, about 90% excipient and about 10% isomerically pure endo compound. In certain embodiments, the isomerically pure endo compound in such compositions can, for example, comprise, at least about 95% by weight endo compound and at most about 5% by weight exo compound, by total weight of the compound.

[0049] In certain embodiments, the active ingredient can be formulated with little or no excipient or carrier.

[0050] Compound described herein may also comprise one or more isotopic substitutions. For example, H may be in any isotopic form, including ¹H, ²H (D or deuterium), and ³H (T or tritium); C may be in any isotopic form, including ¹²C, ¹³C, and ¹⁴C; O may be in any isotopic form, including ¹⁶O and ¹⁸O; N may be in any isotopic form, including ¹⁴N and ¹⁵N; F may be in any isotopic form, including ¹⁸F, ¹⁹F, and the like.

[0051] The term “pharmaceutically acceptable salt” is meant to include salts of the active compounds that are prepared with relatively nontoxic acids or bases, depending on the particular substituents found on the compounds described herein. When compounds of the present disclosure contain relatively acidic functionalities, base addition salts can be obtained by contacting the neutral form of such compounds with a sufficient amount of the desired base, either neat or in a suitable inert solvent. Examples of pharmaceutically acceptable base addition salts include sodium, potassium, calcium, ammonium, organic amino, or magnesium salt, or a similar salt. When compounds of the present invention contain relatively basic functionalities, acid addition salts can be obtained by contacting the neutral form of such compounds with a sufficient amount of the desired acid, either neat or in a suitable inert solvent. Examples of pharmaceutically acceptable acid addition salts include those derived from inorganic acids like hydrochloric, hydrobromic, nitric, carbonic, monohydrogencarbonic, phosphoric, monohydrogenphosphoric, dihydrogenphosphoric, sulfuric, monohydrogensulfuric, hydriodic, or phosphorous acids and the like, as well as the salts derived from organic acids like acetic, propionic, isobutyric, maleic, malonic, benzoic, succinic, suberic, fumaric, lactic, mandelic, phthalic, benzenesulfonic, p-tolylsulfonic, citric, tartaric, methanesulfonic, and the like. Also included are salts of amino acids such as arginate and the like, and salts of organic acids like glucuronic or galactunoric acids and the like (see, e.g., Berge et al, Journal of Pharmaceutical Science 66: 1-19 (1977)). Certain specific compounds of the present invention contain both basic and acidic functionalities that allow the compounds to be converted into either base or acid addition salts. These salts may be prepared by methods known to those skilled in the art. Other pharmaceutically acceptable carriers known to those of skill in the art are suitable for the present invention.

[0052] In addition to salt forms, the present disclosure provides compounds in a prodrug form. Prodrugs of the compounds described herein are those compounds that readily undergo chemical changes under physiological conditions to provide the compounds of the present invention. Additionally, prodrugs can be converted to the compounds of the present invention by chemical or biochemical methods in an ex vivo environment. For example, prodrugs can be slowly converted to the compounds of the present invention when placed in a transdermal patch reservoir with a suitable enzyme or chemical reagent.

[0053] The term “solvate” refers to forms of the compound that are associated with a solvent, usually by a solvolysis reaction. This physical association may include hydrogen bonding. Conventional solvents include water, methanol, ethanol, acetic acid, DMSO, THF, diethyl ether, and the like. The compounds of Formulas (I), (III), or (V) may be prepared, e.g., in crystalline form, and may be solvated. Suitable solvates include pharmaceutically acceptable solvates and further include both stoichiometric solvates and non-stoichiometric solvates. In certain instances, the solvate will be capable of isolation, for example, when one or more solvent molecules are incorporated in the crystal lattice of a crystalline solid. “Solvate” encompasses both solution-phase and isolable solvates. Representative solvates include hydrates, ethanolates, and methanolates.

[0054] The term “hydrate” refers to a compound which is associated with water. Typically, the number of the water molecules contained in a hydrate of a compound is in a definite ratio to the number of the compound molecules in the hydrate. Therefore, a hydrate of a compound may be represented, for example, by the general formula R·x H₂O, wherein R is the compound and wherein x is a number greater than 0. A given compound may form more than one type of hydrates, including, e.g., monohydrates (x is 1), lower hydrates (x is a number greater than 0 and smaller than 1, e.g., hemihydrates (R.0.5 H₂O)), and polyhydrates (x is a number greater than 1, e.g., dihydrates (R.2 H₂O) and hexahydrates (R.6 H₂O)).

[0055] The term “tautomer” refers to compounds that are interchangeable forms of a particular compound structure, and that vary in the displacement of hydrogen atoms and electrons. Thus, two structures may be in equilibrium through the movement of π electrons and an atom (usually H). For example, enols and ketones are tautomers because they are rapidly interconverted by treatment with either acid or base. Another example of tautomerism is the aci- and nitro-forms of phenylnitromethane that are likewise formed by treatment with acid or base. Tautomeric forms may be relevant to the attainment of the optimal chemical reactivity and biological activity of a compound of interest.

### Other Definitions

[0056] The following definitions are more general terms used throughout the present disclosure.

[0057] The articles “a” and “an” refer to one or more than one (e.g., to at least one) of the grammatical object of the article. By way of example, “an element” means one element or more than one element. The term “and/or” means either “and” or “or” unless indicated otherwise.

[0058] The term “about” is used herein to mean within the typical ranges of tolerances in the art. For example, “about” can be understood as about 2 standard deviations from the mean. In certain embodiments, about means ±10%. In certain embodiments, about means +5%. When about is present before a series of numbers or a range, it is understood that “about” can modify each of the numbers in the series or range.

[0059] “Acquire” or “acquiring” as used herein, refer to obtaining possession of a value, e.g., a numerical value, or image, or a physical entity (e.g., a sample), by “directly acquiring” or “indirectly acquiring” the value or physical entity. “Directly acquiring” means performing a process (e.g., performing an analytical method or protocol) to obtain the value or physical entity. “Indirectly acquiring” refers to receiving the value or physical entity from another party or source (e.g., a third-party laboratory that directly acquired the physical entity or value). Directly acquiring a value or physical entity includes performing a process that includes a physical change in a physical substance or the use of a machine or device. Examples of directly acquiring a value include obtaining a sample from a human subject. Directly acquiring a value includes performing a process that uses a machine or device, e.g., mass spectrometer to acquire mass spectrometry data.

[0060] The terms “administer,” “administering,” or “administration,” as used herein refers to implanting, absorbing, ingesting, injecting, inhaling, or otherwise introducing an inventive compound, or a pharmaceutical composition thereof.

[0061] As used herein, the terms “condition,” “disease,” and “disorder” are used interchangeably.

[0062] An “effective amount” of a compound of Formulas (I), (III), or (V) refers to an amount sufficient to elicit the desired biological response, i.e., treating the condition. As will be appreciated by those of ordinary skill in this art, the effective amount of a compound of Formulas (I), (III), or (V) may vary depending on such factors as the desired biological endpoint, the pharmacokinetics of the compound, the condition being treated, the mode of administration, and the age and health of the subject. An effective amount encompasses therapeutic and prophylactic treatment. For example, in treating cancer, an effective amount of an inventive compound may reduce the tumor burden or stop the growth or spread of a tumor.

[0063] A “therapeutically effective amount” of a compound of Formulas (I), (III), or (V) is an amount sufficient to provide a therapeutic benefit in the treatment of a condition or to delay or minimize one or more symptoms associated with the condition. In some embodiments, a therapeutically effective amount is an amount sufficient to provide a therapeutic benefit in the treatment of a condition or to minimize one or more symptoms associated with the condition. A therapeutically effective amount of a compound means an amount of therapeutic agent, alone or in combination with other therapies, which provides a therapeutic benefit in the treatment of the condition. The term “therapeutically effective amount” can encompass an amount that improves overall therapy, reduces or avoids symptoms or causes of the condition, or enhances the therapeutic efficacy of another therapeutic agent.

[0064] The terms “peptide,” “polypeptide,” and “protein” are used interchangeably, and refer to a compound comprised of amino acid residues covalently linked by peptide bonds. A protein or peptide must contain at least two amino acids, and no limitation is placed on the maximum number of amino acids that can comprised therein. Polypeptides include any peptide or protein comprising two or more amino acids joined to each other by peptide bonds. As used herein, the term refers to both short chains, which also commonly are referred to in the art as peptides, oligopeptides and oligomers, for example, and to longer chains, which generally are referred to in the art as proteins, of which there are many types.

[0065] “Prevention,” “prevent,” and “preventing” as used herein refers to a treatment that comprises administering a therapy, e.g., administering a compound described herein (e.g., a compound of Formulas (I), (III), or (V)) prior to the onset of a disease, disorder, or condition in order to preclude the physical manifestation of said disease, disorder, or condition. In some embodiments, “prevention,” “prevent,” and “preventing” require that signs or symptoms of the disease, disorder, or condition have not yet developed or have not yet been observed. In some embodiments, treatment comprises prevention and in other embodiments it does not.

[0066] A “subject” to which administration is contemplated includes, but is not limited to, humans (i.e., a male or female of any age group, e.g., a pediatric subject (e.g., infant, child, adolescent) or adult subject (e.g., young adult, middle—aged adult, or senior adult)) and/or other non-human animals, for example, mammals (e.g., primates (e.g., cynomolgus monkeys, rhesus monkeys); commercially relevant mammals such as cattle, pigs, horses, sheep, goats, cats, and/or dogs) and birds (e.g., commercially relevant birds such as chickens, ducks, geese, and/or turkeys). In certain embodiments, the animal is a mammal. The animal may be a male or female and at any stage of development. A non-human animal may be a transgenic animal.

[0067] As used herein, the terms “treatment,” “treat,” and “treating” refer to reversing, alleviating, delaying the onset of, or inhibiting the progress of one or more of a symptom, manifestation, or underlying cause of a disease, disorder, or condition (e.g., as described herein), e.g., by administering a therapy, e.g., administering a compound described herein (e.g., a compound of Formulas (I), (III), or (V)). In an embodiment, treating comprises reducing, reversing, alleviating, delaying the onset of, or inhibiting the progress of a symptom of a disease, disorder, or condition. In an embodiment, treating comprises reducing, reversing, alleviating, delaying the onset of, or inhibiting the progress of a manifestation of a disease, disorder, or condition. In an embodiment, treating comprises reducing, reversing, alleviating, reducing, or delaying the onset of, an underlying cause of a disease, disorder, or condition. In some embodiments, “treatment,” “treat,” and “treating” require that signs or symptoms of the disease, disorder, or condition have developed or have been observed. In other embodiments, treatment may be administered in the absence of signs or symptoms of the disease or condition, e.g., in preventive treatment. For example, treatment may be administered to a susceptible individual prior to the onset of symptoms (e.g., in light of a history of symptoms and/or in light of genetic or other susceptibility factors). Treatment may also be continued after symptoms have resolved, for example, to delay or prevent recurrence. Treatment may also be continued after symptoms have resolved, for example, to delay or prevent recurrence. In some embodiments, treatment comprises prevention and in other embodiments it does not.

[0068] A “proliferative disease” refers to a disease that occurs due to abnormal extension by the multiplication of cells (Walker, Cambridge Dictionary of Biology; Cambridge University Press: Cambridge, UK, 1990). A proliferative disease may be associated with: 1) the pathological proliferation of normally quiescent cells; 2) the pathological migration of cells from their normal location (e.g., metastasis of neoplastic cells); 3) the pathological expression of proteolytic enzymes such as the matrix metalloproteinases (e.g., collagenases, gelatinases, and elastases); 4) the pathological angiogenesis as in proliferative retinopathy and tumor metastasis; or 5) evasion of host immune surveillance and elimination of neoplastic cells. Exemplary proliferative diseases include cancers (i.e., “malignant neoplasms”), benign neoplasms, and angiogenesis.

[0069] A “non-proliferative disease” refers to a disease that does not primarily extend through the abnormal multiplication of cells. A non-proliferative disease may be associated with any cell type or tissue type in a subject. Exemplary non-proliferative diseases include neurological diseases or disorders (e.g., a repeat expansion disease); autoimmune disease or disorders; immunodeficiency diseases or disorders; lysosomal storage diseases or disorders; inflammatory diseases or disorders; cardiovascular conditions, diseases, or disorders; metabolic diseases or disorders; respiratory conditions, diseases, or disorders; renal diseases or disorders; and infectious diseases.

### Compounds

[0070] In one aspect, the present disclosure features a compound of Formula (I):

[chemical structure]

or a pharmaceutically acceptable salt, solvate, hydrate, tautomer, or stereoisomer thereof, wherein A and B are each independently cycloalkyl, heterocyclyl, aryl, or heteroaryl, each of which is optionally substituted with one or more R¹; each of L¹ and L² is independently is absent, C₁-C₆-alkylene, C₁-C₆-heteroalkylene, —O—, —C(O)—, —N(R⁸)—, —N(R⁸)C(O)—, or —C(O)N(R⁸)—, wherein each alkylene and heteroalkylene is optionally substituted with one or more R⁹; each of W, X, and Z is independently C(R³) or N; Y is N, N(R^{4a}), C(R^{4b}), or C(R^{4b})(R^{4c}), wherein the dashed lines in the ring comprising Y may be single or double bonds as valency permits; each R¹ is independently hydrogen, C₁-C₆-alkyl, C₂-C₆-alkenyl, C₂-C₆-alkynyl, C₁-C₆-heteroalkyl, C₁-C₆-haloalkyl, cycloalkyl, heterocyclyl, aryl, C₁-C₆ alkylene-aryl, C₁-C₆ alkenylene-aryl, C₁-C₆ alkylene-heteroaryl, heteroaryl, halo, cyano, oxo, —OR^{A}, —NR^{B}R^{C}, —NR^{B}C(O)R^{D}, —NO₂, —C(O)NR^{B}R^{C}, —C(O)R^{D}, —C(O)OR^{D}, or —S(O)ₓR^{D}, wherein each alkyl, alkylene, alkenyl, alkynyl, heteroalkyl, haloalkyl, cycloalkyl, heterocyclyl, aryl, and heteroaryl is optionally substituted with one or more R⁵; or two R¹ groups, together with the atoms to which they are attached, form a 3-7-membered cycloalkyl, heterocyclyl, aryl, or heteroaryl, wherein each cycloalkyl, heterocyclyl, aryl, and heteroaryl is optionally substituted with one or more R⁵; R² is absent, hydrogen, or C₁-C₆-alkyl; R³ is hydrogen, C₁-C₆-alkyl, C₂-C₆-alkenyl, C₂-C₆-alkynyl, C₁-C₆-heteroalkyl, C₁-C₆-haloalkyl, halo, cyano, —OR^{A}, —NR^{B}R^{C}, —C(O)R^{D}, or —C(O)OR^{D}; R^{4a} is hydrogen, C₁-C₆-alkyl, C₁-C₆-heteroalkyl, or C₁-C₆-haloalkyl; each of R^{4b} and R^{4c} is independently hydrogen, C₁-C₆-alkyl, C₁-C₆-heteroalkyl, C₁-C₆-haloalkyl, halo, or —OR^{A}; each R⁵ is independently C₁-C₆-alkyl, C₂-C₆-alkenyl, C₂-C₆-alkynyl, C₁-C₆-heteroalkyl, C₁-C₆-haloalkyl, cycloalkyl, heterocyclyl, aryl, heteroaryl, halo, oxo, cyano, —OR^{A}, —NR^{B}R^{C}, —NR^{B}C(O)R^{D}, —NO₂, —C(O)NR^{B}R^{C}, —C(O)R^{D}, —C(O)OR^{D}, or —S(O)ₓR^{D}, wherein each alkyl, alkenyl, alkynyl, heteroalkyl, haloalkyl, cycloalkyl, heterocyclyl, aryl, and heteroaryl is optionally substituted with one or more R⁶; each R⁶ is independently C₁-C₆-alkyl, C₁-C₆-heteroalkyl, C₁-C₆-haloalkyl, cycloalkyl, heterocyclyl, aryl, heteroaryl, halo, cyano, oxo, or —OR^{A}; each R⁸ is independently hydrogen, C₁-C₆-alkyl, or C₁-C₆-haloalkyl; each R⁹ is independently C₁-C₆-alkyl, C₁-C₆-heteroalkyl, C₁-C₆-haloalkyl, cycloalkyl, halo, cyano, oxo, —OR^{A}, —NR^{B}R^{C}, —C(O)R^{D}, or —C(O)OR^{D}; each R^{A} is independently hydrogen, C₁-C₆ alkyl, C₁-C₆ haloalkyl, aryl, heteroaryl, C₁-C₆ alkylene-aryl, C₁-C₆ alkylene-heteroaryl, —C(O)R^{D}, or —S(O)ₓR^{D}; each R^{B} and R^{C} is independently hydrogen, C₁-C₆ alkyl, C₁-C₆ heteroalkyl, cycloalkyl, heterocyclyl, —OR^{A}; or R^{B} and R^{C} together with the atom to which they are attached form a 3-7-membered heterocyclyl ring optionally substituted with one or more R¹⁰; each R^{D} is independently hydrogen, C₁-C₆ alkyl, C₂-C₆ alkenyl, C₂-C₆ alkynyl, C₁-C₆ heteroalkyl, C₁-C₆ haloalkyl, cycloalkyl, heterocyclyl, aryl, heteroaryl, C₁-C₆ alkylene-aryl, or C₁-C₆ alkylene-heteroaryl; each R¹⁰ is independently C₁-C₆-alkyl or halo; and x is 0, 1, or 2.

[0071] In another aspect, the present disclosure features a compound of Formula (III):

[chemical structure]

or a pharmaceutically acceptable salt, solvate, hydrate, tautomer, or stereoisomer thereof, wherein A and B are each independently cycloalkyl, heterocyclyl, aryl, or heteroaryl, each of which is optionally substituted with one or more R¹; each of L¹ and L² is independently absent, C₁-C₆-alkylene, C₁-C₆-heteroalkylene, —O—, —C(O)—, —N(R⁸)—, —N(R⁸)C(O)—, or —C(O)N(R⁸)—, wherein each alkylene and heteroalkylene is optionally substituted with one or more R⁹; each of X and Z is independently C(R³) or N; Y is N, C, or C(R^{4b}), wherein the dashed lines in the ring comprising Y may be single or double bonds as valency permits; each R¹ is independently hydrogen, C₁-C₆-alkyl, C₂-C₆-alkenyl, C₂-C₆-alkynyl, C₁-C₆-heteroalkyl, C₁-C₆-haloalkyl, cycloalkyl, heterocyclyl, aryl, C₁-C₆ alkylene-aryl, C₁-C₆ alkenylene-aryl, C₁-C₆ alkylene-heteroaryl, heteroaryl, halo, cyano, oxo, —OR^{A}, —NR^{B}R^{C}, —NR^{B}C(O)R^{D}, —NO₂, —C(O)NR^{B}R^{C}, —C(O)R^{D}, —C(O)OR^{D}, or —S(O)ₓR^{D}, wherein each alkyl, alkylene, alkenyl, alkynyl, heteroalkyl, haloalkyl, cycloalkyl, heterocyclyl, aryl, and heteroaryl is optionally substituted with one or more R⁵; or two R¹ groups, together with the atoms to which they are attached, form a 3-7-membered cycloalkyl, heterocyclyl, aryl, or heteroaryl, wherein each cycloalkyl, heterocyclyl, aryl, and heteroaryl is optionally substituted with one or more R⁵; R² is absent, hydrogen, or C₁-C₆-alkyl; R³ is hydrogen, C₁-C₆-alkyl, C₂-C₆-alkenyl, C₂-C₆-alkynyl, C₁-C₆-heteroalkyl, C₁-C₆-haloalkyl, halo, cyano, —OR^{A}, —NR^{B}R^{C}, —C(O)R^{D}, or —C(O)OR^{D}; R^{4b} is hydrogen, C₁-C₆-alkyl, C₁-C₆-heteroalkyl, or C₁-C₆-haloalkyl; each R⁵ is independently C₁-C₆-alkyl, C₂-C₆-alkenyl, C₂-C₆-alkynyl, C₁-C₆-heteroalkyl, C₁-C₆-haloalkyl, cycloalkyl, heterocyclyl, aryl, heteroaryl, halo, oxo, cyano, —OR^{A}, —NR^{B}R^{C}, —NR^{B}C(O)R^{D}, —NO₂, —C(O)NR^{B}R^{C}, —C(O)R^{D}, —C(O)OR^{D}, or —S(O)ₓR^{D}, wherein each alkyl, alkenyl, alkynyl, heteroalkyl, haloalkyl, cycloalkyl, heterocyclyl, aryl, and heteroaryl is optionally substituted with one or more R⁶; each R⁶ is independently C₁-C₆-alkyl, C₁-C₆-heteroalkyl, C₁-C₆-haloalkyl, cycloalkyl, heterocyclyl, aryl, heteroaryl, halo, cyano, oxo, or —OR^{A}; R^{7a} is hydrogen, C₁-C₆-alkyl, C₁-C₆-heteroalkyl, C₁-C₆-haloalkyl, halo, cyano, oxo, or —OR^{A}; R^{7b}is hydrogen, C₁-C₆-alkyl, C₁-C₆-heteroalkyl, C₁-C₆-haloalkyl, halo, cyano, or —OR^{A}; each R⁸ is independently hydrogen, C₁-C₆-alkyl, or C₁-C₆-haloalkyl; each R⁹ is independently C₁-C₆-alkyl, C₁-C₆-heteroalkyl, C₁-C₆-haloalkyl, cycloalkyl, halo, cyano, oxo, —OR^{A}, —NR^{B}R^{C}, —C(O)R^{D}, or —C(O)OR^{D}; each R^{A} is independently hydrogen, C₁-C₆ alkyl, C₁-C₆ haloalkyl, aryl, heteroaryl, C₁-C₆ alkylene-aryl, C₁-C₆ alkylene-heteroaryl, —C(O)R^{D}, or —S(O)ₓR^{D}; each R^{B} and R^{C} is independently hydrogen, C₁-C₆ alkyl, C₁-C₆ heteroalkyl, cycloalkyl, heterocyclyl, —OR^{A}; or R^{B} and R^{C} together with the atom to which they are attached form a 3-7-membered heterocyclyl ring optionally substituted with one or more R¹⁰; each R^{D} is independently hydrogen, C₁-C₆ alkyl, C₂-C₆ alkenyl, C₂-C₆ alkynyl, C₁-C₆ heteroalkyl, C₁-C₆ haloalkyl, cycloalkyl, heterocyclyl, aryl, heteroaryl, C₁-C₆ alkylene-aryl, or C₁-C₆ alkylene-heteroaryl; each R¹⁰ is independently C₁-C₆-alkyl or halo; and x is 0, 1, or 2.

[0072] In another aspect, the present disclosure features a compound of Formula (V):

[chemical structure]

or a pharmaceutically acceptable salt, solvate, hydrate, tautomer, or stereoisomer thereof, wherein A is cycloalkyl, heterocyclyl, aryl, or heteroaryl, each of which is optionally substituted with one or more R¹; R^{B} is B, C₁-C₆-alkyl, or C₁-C₆-heteroalkyl, wherein alkyl and heteroalkyl are substituted by one or more R¹⁰; B is cycloalkyl, heterocyclyl, aryl, or heteroaryl, each of which is optionally substituted with one or more R¹; each of which is optionally substituted with one or more R¹; each of L¹ and L² is independently absent, C₁-C₆-alkylene, C₁-C₆-heteroalkylene, —O—, —C(O)—, —N(R⁴)—, —N(R⁴)C(O)—, or —C(O)N(R⁴)—, wherein each alkylene and heteroalkylene is optionally substituted with one or more R⁹; Y is N, C(R^{6a}), or C(R^{6a})(R^{6b}), wherein the dashed lines in the ring comprising Y may be single or double bonds as valency permits; each R¹ is independently hydrogen, C₁-C₆-alkyl, C₂-C₆-alkenyl, C₂-C₆-alkynyl, C₁-C₆-heteroalkyl, C₁-C₆-haloalkyl, cycloalkyl, heterocyclyl, aryl, C₁-C₆ alkylene-aryl, C₁-C₆ alkenylene-aryl, C₁-C₆ alkylene-heteroaryl, heteroaryl, halo, cyano, oxo, —OR^{A}, —NR^{B}R^{C}, —NR^{B}C(O)R^{D}, —NO₂, —C(O)NR^{B}R^{C}, —C(O)R^{D}, —C(O)OR^{D}, or —S(O)ₓR^{D}, wherein each alkyl, alkylene, alkenyl, alkynyl, heteroalkyl, haloalkyl, cycloalkyl, heterocyclyl, aryl, and heteroaryl is optionally substituted with one or more R⁵; or two R¹ groups, together with the atoms to which they are attached, form a 3-7-membered cycloalkyl, heterocyclyl, aryl, or heteroaryl, wherein each cycloalkyl, heterocyclyl, aryl, and heteroaryl is optionally substituted with one or more R⁵; each R² is independently hydrogen or C₁-C₆-alkyl; R³ is C₁-C₆-alkyl, C₂-C₆-alkenyl, C₂-C₆-alkynyl, C₁-C₆-heteroalkyl, C₁-C₆-haloalkyl, halo, cyano, —OR^{A}, —NR^{B}R^{C}, —C(O)R^{D}, or —C(O)OR^{D}; R⁴ is hydrogen, C₁-C₆-alkyl, or C₁-C₆-haloalkyl; each R⁵ is independently C₁-C₆-alkyl, C₂-C₆-alkenyl, C₂-C₆-alkynyl, C₁-C₆-heteroalkyl, C₁-C₆-haloalkyl, cycloalkyl, heterocyclyl, aryl, heteroaryl, halo, oxo, cyano, —OR^{A}, —NR^{B}R^{C}, —NR^{B}C(O)R^{D}, —NO₂, —C(O)NR^{B}R^{C}, —C(O)R^{D}, —C(O)OR^{D}, or —S(O)ₓR^{D}, wherein each alkyl, alkenyl, alkynyl, heteroalkyl, haloalkyl, cycloalkyl, heterocyclyl, aryl, and heteroaryl is optionally substituted with one or more R⁷; R^{6a} and R^{6b} is independently hydrogen, C₁-C₆-alkyl, C₁-C₆-heteroalkyl, Cᵢ-C₆-haloalkyl, or halo; each R⁷ is independently C₁-C₆-alkyl, C₁-C₆-heteroalkyl, C₁-C₆-haloalkyl, cycloalkyl, heterocyclyl, aryl, heteroaryl, halo, cyano, oxo, or —OR^{A}; each R^{A} is independently hydrogen, C₁-C₆ alkyl, C₁-C₆ haloalkyl, aryl, heteroaryl, C₁-C₆ alkylene-aryl, C₁-C₆ alkylene-heteroaryl, —C(O)R^{D}, or —S(O)ₓR^{D}; each R^{B} and R^{C} is independently hydrogen, C₁-C₆ alkyl, C₁-C₆ heteroalkyl, cycloalkyl, heterocyclyl, —OR^{A}; or R^{B} and R^{C} together with the atom to which they are attached form a 3-7-membered heterocyclyl ring optionally substituted with one or more R⁹; each R^{D} is independently hydrogen, C₁-C₆ alkyl, C₂-C₆ alkenyl, C₂-C₆ alkynyl, C₁-C₆ heteroalkyl, C₁-C₆ haloalkyl, cycloalkyl, heterocyclyl, aryl, heteroaryl, C₁-C₆ alkylene-aryl, or C₁-C₆ alkylene-heteroaryl; each R⁹ and R¹⁰ is independently C₁-C₆-alkyl or halo; n is 0, 1, or 2; m is 0, 1, 2, or 3; and x is 0, 1, or 2.

[0073] In some embodiments, for Formula (V), R^{B} is B, wherein B is cycloalkyl, heterocyclyl, aryl, or heteroaryl, each of which is optionally substituted with one or more R¹.

[0074] As generally described herein for compounds of Formula (I), (III), and (V), each of A or B are independently cycloalkyl, heterocyclyl, aryl, or heteroaryl, each of which is optionally substituted with one or more R¹.

[0075] In some embodiments, each of A and B are independently a monocyclic ring, e.g., monocyclic cycloalkyl, monocyclic heterocyclyl, monocyclic aryl, or monocyclic heteroaryl. The monocyclic ring may be saturated, partially unsaturated, or fully unsaturated (e.g., aromatic). In some embodiments, A or B are independently a monocyclic ring comprising between 3 and 10 ring atoms (e.g., 3, 4, 5, 6, 7, 8, 9, or 10 ring atoms). In some embodiments, A is a 4-membered monocyclic ring. In some embodiments, B is a 4-membered monocyclic ring. In some embodiments, A is a 5-membered monocyclic ring. In some embodiments, B is a 5-membered monocyclic ring. In some embodiments, A is a 6-membered monocyclic ring. In some embodiments, B is a 6-membered monocyclic ring. In some embodiments, A is a 7-membered monocyclic ring. In some embodiments, B is a 7-membered monocyclic ring. In some embodiments, A is an 8-membered monocyclic ring. In some embodiments, B is an 8-membered monocyclic ring. In some embodiments, A or B are independently a monocyclic ring optionally substituted with one or more R¹.

[0076] In some embodiments, A or B are independently a bicyclic ring, e.g., bicyclic cycloalkyl, bicyclic heterocyclyl, bicyclic aryl, or bicyclic heteroaryl. The bicyclic ring may be saturated, partially unsaturated, or fully unsaturated (e.g., aromatic). In some embodiments, A or B are independently a bicyclic ring comprising a fused, bridged, or spiro ring system. In some embodiments, A or B are independently a bicyclic ring comprising between 4 and 18 ring atoms (e.g., 4, 5, 6, 7, 8, 9, 10, 11, 12, 13, 14, 15, 16, 17, or 18 ring atoms). In some embodiments, A is a 6-membered bicyclic ring. In some embodiments, B is a 6-membered bicyclic ring. In some embodiments, A is a 7-membered bicyclic ring. In some embodiments, B is a 7-membered bicyclic ring. In some embodiments, A is an 8-membered bicyclic ring. In some embodiments, B is an 8-membered bicyclic ring. In some embodiments, A is a 9-membered bicyclic ring. In some embodiments, B is a 9-membered bicyclic ring. In some embodiments, A is a 10-membered bicyclic ring. In some embodiments, B is a 10-membered bicyclic ring. In some embodiments, A is an 11-membered bicyclic ring. In some embodiments, B is an 11-membered bicyclic ring. In some embodiments, A is a 12-membered bicyclic ring. In some embodiments, B is a 12-membered bicyclic ring. In some embodiments, A or B are independently a bicyclic ring optionally substituted with one or more R¹.

[0077] In some embodiments, A or B are independently a tricyclic ring, e.g., tricyclic cycloalkyl, tricyclic heterocyclyl, tricyclic aryl, or tricyclic heteroaryl. The tricyclic ring may be saturated, partially unsaturated, or fully unsaturated (e.g., aromatic). In some embodiments, A or B are independently a tricyclic ring that comprises a fused, bridged, or spiro ring system, or a combination thereof. In some embodiments, A or B are independently a tricyclic ring comprising between 6 and 24 ring atoms (e.g., 6, 7, 8, 9, 10, 11, 12, 13, 14, 15, 16, 17, 18, 19, 20, 21, 22, 23, or 24 ring atoms). In some embodiments, A is an 8-membered tricyclic ring. In some embodiments, B is an 8-membered tricyclic ring. In some embodiments, A is a 9-membered tricyclic ring. In some embodiments, B is a 9-membered tricyclic ring. In some embodiments, A is a 10-membered tricyclic ring. In some embodiments, B is a 10-membered tricyclic ring. In some embodiments, A or B are independently a tricyclic ring optionally substituted with one or more R¹.

[0078] In some embodiments, A or B are independently monocyclic cycloalkyl, monocyclic heterocyclyl, monocyclic aryl, or monocyclic heteroaryl. In some embodiments, A or B are independently bicyclic cycloalkyl, bicyclic heterocyclyl, bicyclic aryl, or bicyclic heteroaryl. In some embodiments, A or B are independently tricyclic cycloalkyl, tricyclic heterocyclyl, tricyclic aryl, or tricyclic heteroaryl. In some embodiments, A is monocyclic heterocyclyl. In some embodiments, B is monocyclic heterocyclyl. In some embodiments, A is bicyclic heterocyclyl. In some embodiments, B is bicyclic heterocyclyl. In some embodiments, A is monocyclic heteroaryl. In some embodiments, B is monocyclic heteroaryl. In some embodiments, A is bicyclic heteroaryl. In some embodiments, B is bicyclic heteroaryl.

[0079] In some embodiments, A or B are independently a nitrogen-containing heterocyclyl, e.g., heterocyclyl comprising one or more nitrogen atom. The one or more nitrogen atom of the nitrogen-containing heterocyclyl may be at any position of the ring. In some embodiments, the nitrogen-containing heterocyclyl is monocyclic, bicyclic, or tricyclic. In some embodiments, A or B are independently heterocyclyl comprising at least 1, at least 2, at least 3, at least 4, at least 5, or at least 6 nitrogen atoms. In some embodiments, A is heterocyclyl comprising 1 nitrogen atom. In some embodiments, B is heterocyclyl comprising 1 nitrogen atom. In some embodiments, A is heterocyclyl comprising 2 nitrogen atoms. In some embodiments, B is heterocyclyl comprising 2 nitrogen atoms. In some embodiments, A is heterocyclyl comprising 3 nitrogen atoms. In some embodiments, B is heterocyclyl comprising 3 nitrogen atoms. In some embodiments, A is heterocyclyl comprising 4 nitrogen atoms. In some embodiments, B is heterocyclyl comprising 4 nitrogen atoms. In some embodiments, A or B are independently a nitrogen-containing heterocyclyl comprising one or more additional heteroatoms, e.g., one or more of oxygen, sulfur, boron, silicon, or phosphorus. In some embodiments, the one or more nitrogen of the nitrogen-containing heterocyclyl is substituted, e.g., with R¹.

[0080] In some embodiments, A or B are independently a nitrogen-containing heteroaryl, e.g., heteroaryl comprising one or more nitrogen atom. The one or more nitrogen atom of the nitrogen-containing heteroaryl may be at any position of the ring. In some embodiments, the nitrogen-containing heteroaryl is monocyclic, bicyclic, or tricyclic. In some embodiments, A or B are independently heteroaryl comprising at least 1, at least 2, at least 3, at least 4, at least 5, or at least 6 nitrogen atoms. In some embodiments, A is heteroaryl comprising 1 nitrogen atom. In some embodiments, B is heteroaryl comprising 1 nitrogen atom. In some embodiments, A is heteroaryl comprising 2 nitrogen atoms. In some embodiments, B is heteroaryl comprising 2 nitrogen atoms. In some embodiments, A is heteroaryl comprising 3 nitrogen atoms. In some embodiments, B is heteroaryl comprising 3 nitrogen atoms. In some embodiments, A is heteroaryl comprising 4 nitrogen atoms. In some embodiments, B is heteroaryl comprising 4 nitrogen atoms. In some embodiments, A or B are independently a nitrogen-containing heteroaryl comprising one or more additional heteroatoms, e.g., one or more of oxygen, sulfur, boron, silicon, or phosphorus. In some embodiments, the one or more nitrogen of the nitrogen-containing heteroaryl is substituted, e.g., with R¹.

[0081] In some embodiments, A is a 6-membered nitrogen-containing heterocyclyl, e.g., a 6-membered heterocyclyl comprising one or more nitrogen. In some embodiments, A is a 6-membered heterocyclyl comprising 1 nitrogen atom. In some embodiments, A is a 6-membered heterocyclyl comprising 2 nitrogen atoms. In some embodiments, A is a 6-membered heterocyclyl comprising 3 nitrogen atoms. In some embodiments, A is a 6-membered heterocyclyl comprising 4 nitrogen atoms. The one or more nitrogen atom of the 6-membered nitrogen-containing heterocyclyl may be at any position of the ring. In some embodiments, A is a 6-membered nitrogen-containing heterocyclyl optionally substituted with one or more R¹. In some embodiments, the one or more nitrogen of the 6-membered nitrogen-containing heterocyclyl is substituted, e.g., with R¹. In some embodiments, A is a 6-membered nitrogen-containing heterocyclyl comprising one or more additional heteroatoms, e.g., one or more of oxygen, sulfur, boron, silicon, or phosphorus.

[0082] In some embodiments, B is a 5-membered nitrogen-containing heterocyclyl or heteroaryl, e.g., a 5-membered heterocyclyl or heteroaryl comprising one or more nitrogen. In some embodiments, B is a 5-membered heterocyclyl comprising 1 nitrogen atom. In some embodiments, B is a 5-membered heteroaryl comprising 1 nitrogen atom. In some embodiments, B is a 5-membered heterocyclyl comprising 2 nitrogen atoms. In some embodiments, B is a 5-membered heteroaryl comprising 2 nitrogen atoms. In some embodiments, B is a 5-membered heterocyclyl comprising 3 nitrogen atoms. In some embodiments, B is a 5-membered heteroaryl comprising 3 nitrogen atoms. The one or more nitrogen atom of the 5-membered nitrogen-containing heterocyclyl or heteroaryl may be at any position of the ring. In some embodiments, B is a 5-membered nitrogen-containing heterocyclyl optionally substituted with one or more R¹. In some embodiments, B is a 5-membered nitrogen-containing heteroaryl optionally substituted with one or more R¹. In some embodiments, the one or more nitrogen of the 5-membered nitrogen-containing heterocyclyl or heteroaryl is substituted, e.g., with R¹. In some embodiments, B is a 5-membered nitrogen-containing heterocyclyl or heteroaryl comprising one or more additional heteroatoms, e.g., one or more of oxygen, sulfur, boron, silicon, or phosphorus.

[0083] In some embodiments, B is a nitrogen-containing bicyclic heteroaryl (e.g., a 9-membered nitrogen-containing bicyclic heteroaryl), that is optionally substituted with one or more R¹. In some embodiments, B is a 9-membered bicyclic heteroaryl comprising 1 nitrogen atom. In some embodiments, B is a 9-membered bicyclic heteroaryl comprising 2 nitrogen atoms. In some embodiments, B is a 9-membered bicyclic heteroaryl comprising 3 nitrogen atoms. In some embodiments, B is a 9-membered bicyclic heteroaryl comprising 4 nitrogen atoms. The one or more nitrogen atom of the 9-membered bicyclic heteroaryl may be at any position of the ring. In some embodiments, B is a 9-membered bicyclic heteroaryl substituted with one or more R¹.

[0084] In some embodiments, each of A and B are independently selected from:

[chemical structure]

[chemical structure]

[chemical structure]

[chemical structure]

[chemical structure]

[chemical structure]

[chemical structure]

[chemical structure]

[chemical structure]

[chemical structure]

[chemical structure]

[chemical structure]

[chemical structure]

[chemical structure]

[chemical structure]

[chemical structure]

[chemical structure]

[chemical structure]

[chemical structure]

[chemical structure]

wherein each R¹ is as defined herein. In an embodiment, A and B are each independently a saturated, partially saturated, or unsaturated (e.g., aromatic) derivative of one of the rings described above. In an embodiment, A and B are each independently a stereoisomer of one of the rings described above.

[0085] In some embodiments, each of A and B are independently selected from:

[chemical structure]

[chemical structure]

[chemical structure]

[chemical structure]

wherein each R¹ is as defined herein. In an embodiment, A and B are each independently a saturated, partially saturated, or unsaturated (e.g., aromatic) derivative of one of the rings described above. In an embodiment, A and B are each independently a stereoisomer of one of the rings described above.

[0086] In some embodiments, A is heterocyclyl. In some embodiments, A is a nitrogen-containing heterocyclyl. In some embodiments, A is a monocyclic nitrogen-containing heterocyclyl. In some embodiments, A is selected from

[chemical structure]

[chemical structure]

[chemical structure]

[chemical structure]

[0087] In some embodiments, A is selected from

[chemical structure]

wherein R¹ is as defined herein.

[0088] In some embodiments, A is selected from,

[chemical structure]

wherein R¹ is as defined herein.

[0089] In some embodiments, A is selected from

[chemical structure]

[0090] In some embodiments, A is heteroaryl. In some embodiments, A is a nitrogen-containing heteroaryl. In some embodiments, A is a bicyclic nitrogen-containing heteroaryl. In some embodiments, A is selected from

[chemical structure]

[chemical structure]

wherein R¹ is as defined herein.

[0091] In some embodiments, A is selected from

[chemical structure]

In some embodiments, A is

[chemical structure]

wherein R¹ is as defined herein. In some embodiments, A is selected from

[chemical structure]

[0092] In some embodiments, A is

[chemical structure]

In some embodiments, A is

[chemical structure]

In some embodiments, A is

[chemical structure]

In some embodiments, A is

[chemical structure]

In some embodiments, A is

[chemical structure]

In some embodiments, A is

[chemical structure]

In some embodiments, A is

[chemical structure]

In some embodiments, A is

[chemical structure]

In some embodiments, A is

[chemical structure]

[0093] In some embodiments, B is heteroaryl. In some embodiments, B is a nitrogen-containing heteroaryl. In some embodiments, B is a bicyclic nitrogen-containing heteroaryl. In some embodiments, B is selected from

[chemical structure]

wherein R¹ is as defined herein. In some embodiments, B is selected from

[chemical structure]

In some embodiments, B is

[chemical structure]

wherein R¹ is as defined herein.

[0094] In some embodiments, B is selected from

[chemical structure]

[0095] In some embodiments, B is heterocyclyl. In some embodiments, B is a nitrogen-containing heterocyclyl. In some embodiments, B is a monocyclic nitrogen-containing heterocyclyl or a bicyclic nitrogen-containing heterocyclyl.

[0096] In some embodiments, B is selected from

[chemical structure]

wherein R¹ is as defined herein. In some embodiments, B is selected from

[chemical structure]

wherein R¹ is as defined herein. In some embodiments, B is selected from,

[chemical structure]

wherein R¹ is as defined herein.

[0097] In some embodiments, B is selected from

[chemical structure]

[0098] In some embodiments, B is

[chemical structure]

In some embodiments, B is

[chemical structure]

In some embodiments, B is

[chemical structure]

In some embodiments, B is

[chemical structure]

In some embodiments, B is

[chemical structure]

In some embodiments, B is

[chemical structure]

In some embodiments, B is

[chemical structure]

[0099] In some embodiments, B is

[chemical structure]

In some embodiments, B is

[chemical structure]

In some embodiments, B is

[chemical structure]

In some embodiments, B is

[chemical structure]

In some embodiments, B is

[chemical structure]

In some embodiments, B is

[chemical structure]

In some embodiments, B is

[chemical structure]

In some embodiments, B is

[chemical structure]

In some embodiments, B is

[chemical structure]

[0100] As generally described for Formulas (I), (III), and (V), each of L¹ and L² may independently be absent or refer to a C₁-C₆-alkylene, C₁-C₆-heteroalkylene, —O—, —C(O)—, —N(R⁸)—, —N(R⁸)C(O)—, or —C(O)N(R⁸)— group, wherein each alkylene and heteroalkylene is optionally substituted with one or more R⁹. In some embodiments, L¹ is absent or C₁-C₆-heteroalkylene. In some embodiments, L¹ is absent. In some embodiments, L¹ is C₁-C₆-heteroalkylene (e.g., —N(CH₃)—). In some embodiments, L² is absent or C₁-C₆-heteroalkylene. In some embodiments, L² is absent. In some embodiments, L² is C₁-C₆-heteroalkylene (e.g., —N(CH₃)—).

[0101] As generally described for Formula (I), each of W, X, and Z may independently be N or C(R³). In some embodiments, W is C(R³) (e.g., CH). In some embodiments, W is N. In some embodiments, X is C(R³) (e.g., CH). In some embodiments, X is N. In some embodiments, Z is C(R³) (e.g., CH). In some embodiments, Z is N. In some embodiments, each of W and X is independently C(R³) (e.g., CH). In some embodiments, each of W and Z is independently C(R³) (e.g., CH). In some embodiments, each of X and Z is independently C(R³) (e.g., CH). In some embodiments, each of W, X, and Z is independently C(R³) (e.g., CH).

[0102] As generally described for Formula (I), Y may be N, N(R^{4a}), C(R^{4b}), or C(R^{4b})(R^{4c}), wherein the dashed lines in the ring comprising Y may be single or double bonds as valency permits. In some embodiments, Y is N(R^{4a}) or C(R^{4b}). In some embodiments, Y is N(R^{4a}) (e.g., NH). In some embodiments, Y is C(R^{4b}) (e.g., CH).

[0103] In some embodiments, W is C(R³) and Y is N(R^{4a}). In some embodiments, W is CH and Y is NH. In some embodiments, X is C(R³) and Y is N(R^{4a}). In some embodiments, X is CH and Y is NH. In some embodiments, Z is C(R³) and Y is N(R^{4a}). In some embodiments, Z is CH and Y is NH. In some embodiments, W and X are independently C(R³) and Y is N(R^{4a}). In some embodiments, W and X are independently C(R³) and Y is NH. In some embodiments, W and Z are independently C(R³) and Y is N(R^{4a}). In some embodiments, W and Z are independently C(R³) and Y is NH. In some embodiments, X and Z are independently C(R³) and Y is N(R^{4a}). In some embodiments, X and Z are independently C(R³) and Y is NH. In some embodiments, each of W, X, and Z is independently C(R³) and Y is N(R^{4a}). In some embodiments, each of W, X, and Z is independently CH and Y is NH.

[0104] In some embodiments, W is C(R³) and Y is N. In some embodiments, W is CH and Y is N. In some embodiments, X is C(R³) and Y is N. In some embodiments, X is CH and Y is N. In some embodiments, Z is C(R³) and Y is N. In some embodiments, Z is CH and Y is N. In some embodiments, W and X are independently C(R³) and Y is N. In some embodiments, W and X are independently C(R³) and Y is N. In some embodiments, W and Z are independently C(R³) and Y is N. In some embodiments, W and Z are independently C(R³) and Y is N. In some embodiments, X and Z are independently C(R³) and Y is N. In some embodiments, X and Z are independently C(R³) and Y is N. In some embodiments, each of W, X, and Z is independently C(R³) and Y is N. In some embodiments, each of W, X, and Z is independently CH and Y is N.

[0105] In some embodiments, R² is absent.

[0106] In some embodiments, R¹ is C₁-C₆-alkyl. In some embodiments, R¹ is CH₃. In some embodiments, A is substituted with 0 or 1 In some embodiments, B is substituted with 0, 1, or 2 R¹.

[0107] In some embodiments of Formula (I), A is a bicyclic heteroaryl and B is a monocyclic heterocyclyl. In some embodiments of Formula (I), Z is N. In some embodiments of Formula (I), each of W, X, and Z is not independently C(R³), e.g., (CH). In some embodiments of Formula (I), the compound is not a compound disclosed in WO 2020/004594.

[0108] In some embodiments, the compound of Formula (I) is a compound of Formula (I-a):

[chemical structure]

or a pharmaceutically acceptable salt, solvate, hydrate, tautomer, or stereoisomer thereof, wherein A and B are each independently cycloalkyl, heterocyclyl, aryl, or heteroaryl, each of which is optionally substituted with one or more R¹; L¹ is absent, C₁-C₆-alkylene, C₁-C₆-heteroalkylene, —O—, —C(O)—, —N(R⁸)—, —N(R⁸)C(O)—, or —C(O)N(R⁸)—, wherein each alkylene and heteroalkylene is optionally substituted with one or more R⁹; each of W, X, and Z is independently C(R³) or N; Y is N, N(R^{4a}), C(R^{4b}), or C(R^{4b})(R^{4c}), wherein the dashed lines in the ring comprising Y may be single or double bonds as valency permits; each R¹ is independently hydrogen, C₁-C₆-alkyl, C₂-C₆-alkenyl, C₂-C₆-alkynyl, C₁-C₆-heteroalkyl, C₁-C₆-haloalkyl, cycloalkyl, heterocyclyl, aryl, C₁-C₆ alkylene-aryl, C₁-C₆ alkenylene-aryl, C₁-C₆ alkylene-heteroaryl, heteroaryl, halo, cyano, oxo, —OR^{A}, —NR^{B}R^{C}, —NR^{B}C(O)R^{D}, —NO₂, —C(O)NR^{B}R^{C}, —C(O)R^{D}, —C(O)OR^{D}, or —S(O)ₓR^{D}, wherein each alkyl, alkylene, alkenyl, alkynyl, heteroalkyl, haloalkyl, cycloalkyl, heterocyclyl, aryl, and heteroaryl is optionally substituted with one or more R⁵; or two R¹ groups, together with the atoms to which they are attached, form a 3-7-membered cycloalkyl, heterocyclyl, aryl, or heteroaryl, wherein each cycloalkyl, heterocyclyl, aryl, and heteroaryl is optionally substituted with one or more R⁵; R² is absent, hydrogen, or C₁-C₆-alkyl; R³ is hydrogen, C₁-C₆-alkyl, C₂-C₆-alkenyl, C₂-C₆-alkynyl, C₁-C₆-heteroalkyl, C₁-C₆-haloalkyl, halo, cyano, —OR^{A}, —NR^{B}R^{C}, —C(O)R^{D}, or —C(O)OR^{D}; R^{4a} is hydrogen, C₁-C₆-alkyl, C₁-C₆-heteroalkyl, or C₁-C₆-haloalkyl; each of R^{4b} and R^{4c} is independently hydrogen, C₁-C₆-alkyl, C₁-C₆-heteroalkyl, C₁-C₆-haloalkyl, halo, or —OR^{A}; each R⁵ is independently C₁-C₆-alkyl, C₂-C₆-alkenyl, C₂-C₆-alkynyl, C₁-C₆-heteroalkyl, C₁-C₆-haloalkyl, cycloalkyl, heterocyclyl, aryl, heteroaryl, halo, oxo, cyano, —OR^{A}, —NR^{B}R^{C}, —NR^{B}C(O)R^{D}, —NO₂, —C(O)NR^{B}R^{C}, —C(O)R^{D}, —C(O)OR^{D}, or —S(O)ₓR^{D}, wherein each alkyl, alkenyl, alkynyl, heteroalkyl, haloalkyl, cycloalkyl, heterocyclyl, aryl, and heteroaryl is optionally substituted with one or more R⁶; each R⁶ is independently C₁-C₆-alkyl, C₁-C₆-heteroalkyl, C₁-C₆-haloalkyl, cycloalkyl, heterocyclyl, aryl, heteroaryl, halo, cyano, oxo, or —OR^{A}; each R⁸ is independently hydrogen, C₁-C₆-alkyl, or C₁-C₆-haloalkyl; each R⁹ is independently C₁-C₆-alkyl, C₁-C₆-heteroalkyl, C₁-C₆-haloalkyl, cycloalkyl, halo, cyano, oxo, —OR^{A}, —NR^{B}R^{C}, —C(O)R^{D}, or —C(O)OR^{D}; each R^{A} is independently hydrogen, C₁-C₆ alkyl, C₁-C₆ haloalkyl, aryl, heteroaryl, C₁-C₆ alkylene-aryl, C₁-C₆ alkylene-heteroaryl, —C(O)R^{D}, or —S(O)ₓR^{D}; each R^{B} and R^{C} is independently hydrogen, C₁-C₆ alkyl, C₁-C₆ heteroalkyl, cycloalkyl, heterocyclyl, —OR^{A}; or R^{B} and R^{C} together with the atom to which they are attached form a 3-7-membered heterocyclyl ring optionally substituted with one or more R¹⁰; each R^{D} is independently hydrogen, C₁-C₆ alkyl, C₂-C₆ alkenyl, C₂-C₆ alkynyl, C₁-C₆ heteroalkyl, C₁-C₆ haloalkyl, cycloalkyl, heterocyclyl, aryl, heteroaryl, C₁-C₆ alkylene-aryl, or C₁-C₆ alkylene-heteroaryl; each R¹⁰ is independently C₁-C₆-alkyl or halo; and x is 0, 1, or 2.

[0109] In some embodiments, A is heterocyclyl optionally substituted with one or more R¹. In some embodiments, A is monocyclic nitrogen-containing heterocyclyl. In some embodiments, A is optionally substituted piperidinyl. In some embodiments, A is selected from

[chemical structure]

wherein R¹ is as defined herein.

[0110] In some embodiments, A is selected from,

[chemical structure]

wherein R¹ is as defined herein. In some embodiments, A is selected from

[chemical structure]

In some embodiments, A is selected from

[chemical structure]

[0111] In some embodiments, A is heteroaryl. In some embodiments, A is a nitrogen-containing heteroaryl. In some embodiments, A is a bicyclic nitrogen-containing heteroaryl.

[0112] In some embodiments, A is selected from

[chemical structure]

In some embodiments, A is

[chemical structure]

wherein R¹ is as defined herein. In some embodiments, A is selected from

[chemical structure]

[0113] In some embodiments, A is

[chemical structure]

In some embodiments, A is

[chemical structure]

In some embodiments, A is

[chemical structure]

In some embodiments, A is

[chemical structure]

In some embodiments, A is

[chemical structure]

In some embodiments, A is

[chemical structure]

In some embodiments, A is

[chemical structure]

In some embodiments, A is

[chemical structure]

In some embodiments, A is

[chemical structure]

[0114] In some embodiments, B is heteroaryl. In some embodiments, B is a nitrogen-containing heteroaryl. In some embodiments, B is a bicyclic nitrogen-containing heteroaryl. In some embodiments, B is selected from

[chemical structure]

In some embodiments, B is

[chemical structure]

wherein R¹ is as defined herein.

[0115] In some embodiments, B is selected from

[chemical structure]

[0116] In some embodiments, B is heterocyclyl. In some embodiments, B is a nitrogen-containing heterocyclyl. In some embodiments, B is a monocyclic nitrogen-containing heterocyclyl or a bicyclic nitrogen-containing heterocyclyl. In some embodiments, B is selected from

[chemical structure]

wherein R¹ is as defined herein. In some embodiments, B is selected from

[chemical structure]

wherein R¹ is as defined herein. In some embodiments, B is selected from,

[chemical structure]

wherein R¹ is as defined herein.

[0117] In some embodiments, B is selected from

[chemical structure]

[0118] In some embodiments, B is

[chemical structure]

In some embodiments, B is

[chemical structure]

In some embodiments, B is

[chemical structure]

In some embodiments, B is

[chemical structure]

In some embodiments, B is

[chemical structure]

In some embodiments, B is

[chemical structure]

In some embodiments, B is

[chemical structure]

In some embodiments, B is

[chemical structure]

In some embodiments, B is

[chemical structure]

In some embodiments, B is

[chemical structure]

In some embodiments, B is

[chemical structure]

In some embodiments, B is

[chemical structure]

In some embodiments, B is

[chemical structure]

In some embodiments, B is

[chemical structure]

[0119] In some embodiments, L¹ is absent or N(CH₃). In some embodiments, L¹ is absent. In some embodiments, L¹ is N(CH₃).

[0120] In some embodiments, each of W, X, and Z may independently be N or C(R³). In some embodiments, W is C(R³) (e.g., CH). In some embodiments, W is N. In some embodiments, X is C(R³) (e.g., CH). In some embodiments, X is N. In some embodiments, Z is C(R³) (e.g., CH). In some embodiments, Z is N. In some embodiments, each of W and X is independently C(R³) (e.g., CH). In some embodiments, each of W and Z is independently C(R³) (e.g., CH). In some embodiments, each of X and Z is independently C(R³) (e.g., CH). In some embodiments, each of W, X, and Z is independently C(R³) (e.g., CH).

[0121] In some embodiments, R^{4a} is hydrogen or C₁-C₆ alkyl. In some embodiments, R^{4a} is hydrogen.

[0122] In some embodiments, R¹ is C₁-C₆-alkyl. In some embodiments, R¹ is CH₃. In some embodiments, A is substituted with 0 or 1 R¹. In some embodiments, B is substituted with 0, 1, or 2 R¹.

[0123] In some embodiments, A is a bicyclic heteroaryl and B is a monocyclic heterocyclyl. In some embodiments of Formula (I), Z is N. In some embodiments of Formula (I), each of W, X, and Z is not independently C(R³), e.g., (CH).

[0124] In some embodiments, the compound of Formula (I) is a compound of Formula (I-b):

[chemical structure]

or a pharmaceutically acceptable salt, solvate, hydrate, tautomer, or stereoisomer thereof, A and B are each independently cycloalkyl, heterocyclyl, aryl, or heteroaryl, each of which is optionally substituted with one or more R¹; L¹ is absent, C₁-C₆-alkylene, C₁-C₆-heteroalkylene, —O—, —C(O)—, —N(R⁸)—, —N(R⁸)C(O)—, or —C(O)N(R⁸)—, wherein each alkylene and heteroalkylene is optionally substituted with one or more R⁹; each of W, X, and Z is independently C(R³) or N; each R¹ is independently hydrogen, C₁-C₆-alkyl, C₂-C₆-alkenyl, C₂-C₆-alkynyl, C₁-C₆-heteroalkyl, C₁-C₆-haloalkyl, cycloalkyl, heterocyclyl, aryl, C₁-C₆ alkylene-aryl, C₁-C₆ alkenylene-aryl, C₁-C₆ alkylene-heteroaryl, heteroaryl, halo, cyano, oxo, —OR^{A}, —NR^{B}R^{C}, —NR^{B}C(O)R^{D}, —NO₂, —C(O)NR^{B}R^{C}, —C(O)R^{D}, —C(O)OR^{D}, or —S(O)ₓR^{D}, wherein each alkyl, alkylene, alkenyl, alkynyl, heteroalkyl, haloalkyl, cycloalkyl, heterocyclyl, aryl, and heteroaryl is optionally substituted with one or more R⁵; or two R¹ groups, together with the atoms to which they are attached, form a 3-7-membered cycloalkyl, heterocyclyl, aryl, or heteroaryl, wherein each cycloalkyl, heterocyclyl, aryl, and heteroaryl is optionally substituted with one or more R⁵; R³ is hydrogen, C₁-C₆-alkyl, C₂-C₆-alkenyl, C₂-C₆-alkynyl, C₁-C₆-heteroalkyl, C₁-C₆-haloalkyl, halo, cyano, —OR^{A}, —NR^{B}R^{C}, —C(O)R^{D}, or —C(O)OR^{D} ; R^{4a} is hydrogen, C₁-C₆-alkyl, C₁-C₆-heteroalkyl, or C₁-C₆-haloalkyl; each R⁵ is independently C₁-C₆-alkyl, C₂-C₆-alkenyl, C₂-C₆-alkynyl, C₁-C₆-heteroalkyl, C₁-C₆-haloalkyl, cycloalkyl, heterocyclyl, aryl, heteroaryl, halo, oxo, cyano, —OR^{A}, —NR^{B}R^{C}, —NR^{B}C(O)R^{D}, —NO₂, —C(O)NR^{B}R^{C}, —C(O)R^{D}, —C(O)OR^{D}, or —S(O)ₓR^{D}, wherein each alkyl, alkenyl, alkynyl, heteroalkyl, haloalkyl, cycloalkyl, heterocyclyl, aryl, and heteroaryl is optionally substituted with one or more R⁶; each R⁶ is independently C₁-C₆-alkyl, C₁-C₆-heteroalkyl, C₁-C₆-haloalkyl, cycloalkyl, heterocyclyl, aryl, heteroaryl, halo, cyano, oxo, or —OR^{A}; each R⁸ is independently hydrogen, C₁-C₆-alkyl, or C₁-C₆-haloalkyl; each R⁹ is independently C₁-C₆-alkyl, C₁-C₆-heteroalkyl, C₁-C₆-haloalkyl, cycloalkyl, halo, cyano, oxo, —OR^{A}, —NR^{B}R^{C}, —C(O)R^{D}, or —C(O)OR^{D}; each R^{A} is independently hydrogen, C₁-C₆ alkyl, C₁-C₆ haloalkyl, aryl, heteroaryl, C₁-C₆ alkylene-aryl, C₁-C₆ alkylene-heteroaryl, —C(O)R^{D}, or —S(O)ₓR^{D}; each R^{B} and R^{C} is independently hydrogen, C₁-C₆ alkyl, C₁-C₆ heteroalkyl, cycloalkyl, heterocyclyl, —OR^{A}; or R^{B} and R^{C} together with the atom to which they are attached form a 3-7-membered heterocyclyl ring optionally substituted with one or more R¹⁰; each R^{D} is independently hydrogen, C₁-C₆ alkyl, C₂-C₆ alkenyl, C₂-C₆ alkynyl, C₁-C₆ heteroalkyl, C₁-C₆ haloalkyl, cycloalkyl, heterocyclyl, aryl, heteroaryl, C₁-C₆ alkylene-aryl, or C₁-C₆ alkylene-heteroaryl; each R¹⁰ is independently C₁-C₆-alkyl or halo; and x is 0, 1, or 2.

[0125] In some embodiments, A is heterocyclyl optionally substituted with one or more R¹. In some embodiments, A is monocyclic nitrogen-containing heterocyclyl. In some embodiments, A is optionally substituted piperidinyl. In some embodiments, A is selected from

[chemical structure]

wherein R¹ is as defined herein.

[0126] In some embodiments, A is selected from,

[chemical structure]

wherein R¹ is as defined herein.

[0127] In some embodiments, A is selected from

[chemical structure]

[0128] In some embodiments, A is heteroaryl. In some embodiments, A is a nitrogen-containing heteroaryl. In some embodiments, A is a bicyclic nitrogen-containing heteroaryl.

[0129] In some embodiments, A is selected from

[chemical structure]

In some embodiments, A is

[chemical structure]

wherein R¹ is as defined herein. In some embodiments, A is selected from

[chemical structure]

[0130] In some embodiments, A is

[chemical structure]

In some embodiments, A is

[chemical structure]

In some embodiments, A is

[chemical structure]

In some embodiments, A is

[chemical structure]

In some embodiments, A is

[chemical structure]

In some embodiments, A is

[chemical structure]

In some embodiments, A is

[chemical structure]

In some embodiments, A is

[chemical structure]

In some embodiments, A is

[chemical structure]

[0131] In some embodiments, B is heteroaryl. In some embodiments, B is a nitrogen-containing heteroaryl. In some embodiments, B is a bicyclic nitrogen-containing heteroaryl. In some embodiments, B is selected from

[chemical structure]

In some embodiments, B is

[chemical structure]

wherein R¹ is as defined herein.

[0132] In some embodiments, B is selected from

[chemical structure]

[0133] In some embodiments, B is heterocyclyl. In some embodiments, B is a nitrogen-containing heterocyclyl. In some embodiments, B is a monocyclic nitrogen-containing heterocyclyl or a bicyclic nitrogen-containing heterocyclyl. In some embodiments, B is selected from

[chemical structure]

wherein R¹ is as defined herein. In some embodiments, B is selected from

[chemical structure]

wherein R¹ is as defined herein. In some embodiments, B is selected from,

[chemical structure]

wherein R¹ is as defined herein.

[0134] In some embodiments, B is selected from

[chemical structure]

[0135] In some embodiments, B is

[chemical structure]

In some embodiments, B is

[chemical structure]

In some embodiments, B is

[chemical structure]

In some embodiments, B is

[chemical structure]

In some embodiments, B is

[chemical structure]

In some embodiments, B is

[chemical structure]

In some embodiments, B is

[chemical structure]

In some embodiments, B is

[chemical structure]

In some embodiments, B is

[chemical structure]

In some embodiments, B is

[chemical structure]

In some embodiments, B is

[chemical structure]

In some embodiments, B is

[chemical structure]

In some embodiments, B is

[chemical structure]

In some embodiments, B is

[chemical structure]

[0136] In some embodiments, L¹ is absent or N(CH₃). In some embodiments, L¹ is absent. In some embodiments, L¹ is N(CH₃).

[0137] In some embodiments, each of W, X, and Z may independently be N or C(R³). In some embodiments, W is C(R³) (e.g., CH). In some embodiments, W is N. In some embodiments, X is C(R³) (e.g., CH). In some embodiments, X is N. In some embodiments, Z is C(R³) (e.g., CH). In some embodiments, Z is N. In some embodiments, each of W and X is independently C(R³) (e.g., CH). In some embodiments, each of W and Z is independently C(R³) (e.g., CH). In some embodiments, each of X and Z is independently C(R³) (e.g., CH). In some embodiments, each of W, X, and Z is independently C(R³) (e.g., CH).

[0138] In some embodiments, R^{4a} is hydrogen or C₁-C₆ alkyl. In some embodiments, R^{4a} is hydrogen.

[0139] In some embodiments, R¹ is C₁-C₆-alkyl. In some embodiments, R¹ is CH₃. In some embodiments, A is substituted with 0 or 1 In some embodiments, B is substituted with 0, 1, or 2 R¹.

[0140] In some embodiments, A is a bicyclic heteroaryl and B is a monocyclic heterocyclyl. In some embodiments of Formula (I), Z is N. In some embodiments of Formula (I), each of W, X, and Z is not independently C(R³), e.g., (CH).

[0141] In some embodiments, the compound of Formula (I) is a compound of Formula (I-c):

[chemical structure]

or a pharmaceutically acceptable salt, solvate, hydrate, tautomer, or stereoisomer thereof, wherein A and B are each independently cycloalkyl, heterocyclyl, aryl, or heteroaryl, each of which is optionally substituted with one or more R¹; Y is N, N(R^{4a}), C(R^{4b}), or C(R^{4b})(R^{4c}), wherein the dashed lines in the ring comprising Y may be single or double bonds as valency permits; each R¹ is independently hydrogen, C₁-C₆-alkyl, C₂-C₆-alkenyl, C₂-C₆-alkynyl, C₁-C₆-heteroalkyl, C₁-C₆-haloalkyl, cycloalkyl, heterocyclyl, aryl, C₁-C₆ alkylene-aryl, C₁-C₆ alkenylene-aryl, C₁-C₆ alkylene-heteroaryl, heteroaryl, halo, cyano, oxo, —OR^{A}, —NR^{B}R^{C}, —NR^{B}C(O)R^{D}, —NO₂, —C(O)NR^{B}R^{C}, —C(O)R^{D}, C(O)OR^{D}, or —S(O)ₓR^{D}, wherein each alkyl, alkylene, alkenyl, alkynyl, heteroalkyl, haloalkyl, cycloalkyl, heterocyclyl, aryl, and heteroaryl is optionally substituted with one or more R⁵; or two R¹ groups, together with the atoms to which they are attached, form a 3-7-membered cycloalkyl, heterocyclyl, aryl, or heteroaryl, wherein each cycloalkyl, heterocyclyl, aryl, and heteroaryl is optionally substituted with one or more R⁵; R² is absent, hydrogen, or C₁-C₆-alkyl; R^{4a} is hydrogen, C₁-C₆-alkyl, C₁-C₆-heteroalkyl, or C₁-C₆-haloalkyl; each of R^{4b} and R^{4c} is independently hydrogen, C₁-C₆-alkyl, C₁-C₆-heteroalkyl, C₁-C₆-haloalkyl, halo, or —OR^{A}; each R⁵ is independently C₁-C₆-alkyl, C₂-C₆-alkenyl, C₂-C₆-alkynyl, C₁-C₆-heteroalkyl, C₁-C₆-haloalkyl, cycloalkyl, heterocyclyl, aryl, heteroaryl, halo, oxo, cyano, —OR^{A}, —NR^{B}R^{C}, NR^{B}C(O)R^{D}, —NO₂, —C(O)NR^{B}R^{C}, —C(O)R^{D}, C(O)OR^{D}, or —S(O)ₓR^{D}, wherein each alkyl, alkenyl, alkynyl, heteroalkyl, haloalkyl, cycloalkyl, heterocyclyl, aryl, and heteroaryl is optionally substituted with one or more R⁶; each R⁶ is independently C₁-C₆-alkyl, C₁-C₆-heteroalkyl, C₁-C₆-haloalkyl, cycloalkyl, heterocyclyl, aryl, heteroaryl, halo, cyano, oxo, or —OR^{A}; each R^{A} is independently hydrogen, C₁-C₆ alkyl, C₁-C₆ haloalkyl, aryl, heteroaryl, C₁-C₆ alkylene-aryl, C₁-C₆ alkylene-heteroaryl, —C(O)R^{D}, or —S(O)ₓR^{D}; each R^{B} and R^{C} is independently hydrogen, C₁-C₆ alkyl, C₁-C₆ heteroalkyl, cycloalkyl, heterocyclyl, —OR^{A}; or R^{B} and R^{C} together with the atom to which they are attached form a 3-7-membered heterocyclyl ring optionally substituted with one or more R¹⁰; each R^{D} is independently hydrogen, C₁-C₆ alkyl, C₂-C₆ alkenyl, C₂-C₆ alkynyl, C₁-C₆ heteroalkyl, C₁-C₆ haloalkyl, cycloalkyl, heterocyclyl, aryl, heteroaryl, C₁-C₆ alkylene-aryl, or C₁-C₆ alkylene-heteroaryl; each le° is independently C₁-C₆-alkyl or halo; and x is 0, 1, or 2.

[0142] In some embodiments, A is heterocyclyl optionally substituted with one or more R¹. In some embodiments, A is monocyclic nitrogen-containing heterocyclyl. In some embodiments, A is optionally substituted piperidinyl. In some embodiments, A is selected from

[chemical structure]

wherein R¹ is as defined herein.

[0143] In some embodiments, A is selected from,

[chemical structure]

wherein R¹ is as defined herein.

[0144] In some embodiments, A is selected from

[chemical structure]

[0145] In some embodiments, A is heteroaryl. In some embodiments, A is a nitrogen-containing heteroaryl. In some embodiments, A is a bicyclic nitrogen-containing heteroaryl.

[0146] In some embodiments, A is selected from

[chemical structure]

In some embodiments, A is

[chemical structure]

wherein R¹ is as defined herein. In some embodiments, A is selected from

[chemical structure]

[0147] In some embodiments, A is

[chemical structure]

In some embodiments, A is

[chemical structure]

In some embodiments, A is

[chemical structure]

In some embodiments, A is

[chemical structure]

In some embodiments, A is

[chemical structure]

In some embodiments, A is

[chemical structure]

In some embodiments, A is

[chemical structure]

In some embodiments, A is

[chemical structure]

In some embodiments, A is

[chemical structure]

[0148] In some embodiments, B is heteroaryl. In some embodiments, B is a nitrogen-containing heteroaryl. In some embodiments, B is a bicyclic nitrogen-containing heteroaryl. In some embodiments, B is selected from

[chemical structure]

In some embodiments, B is

[chemical structure]

wherein R¹ is as defined herein.

[0149] In some embodiments, B is selected from

[chemical structure]

[0150] In some embodiments, B is heterocyclyl. In some embodiments, B is a nitrogen-containing heterocyclyl. In some embodiments, B is a monocyclic nitrogen-containing heterocyclyl or a bicyclic nitrogen-containing heterocyclyl. In some embodiments, B is selected from

[chemical structure]

wherein R¹ is as defined herein. In some embodiments, B is selected from

[chemical structure]

wherein R¹ is as defined herein. In some embodiments, B is selected from,

[chemical structure]

wherein R¹ is as defined herein.

[0151] In some embodiments, B is selected from

[chemical structure]

[0152] In some embodiments, B is

[chemical structure]

In some embodiments, B is

[chemical structure]

[0153] In some embodiments, B is

[chemical structure]

In some embodiments, B is

[chemical structure]

In some embodiments, B is

[chemical structure]

In some embodiments, B is

[chemical structure]

In some embodiments, B is

[chemical structure]

In some embodiments, B is

[chemical structure]

In some embodiments, B is

[chemical structure]

In some embodiments, B is

[chemical structure]

In some embodiments, B is

[chemical structure]

In some embodiments, B is

[chemical structure]

In some embodiments, B is

[chemical structure]

In some embodiments, B is

[chemical structure]

[0154] As generally described, Y may be N, N(R^{4a}), C(R^{4b}), or C(R^{4b})(R^{4c}), wherein the dashed lines in the ring comprising Y may be single or double bonds as valency permits. In some embodiments, Y is N(R^{4a}) or C(R^{4b}). In some embodiments, Y is N(R^{4a}) (e.g., NH). In some embodiments, Y is C(R^{4b}) (e.g., CH).

[0155] In some embodiments, R² is absent.

[0156] In some embodiments, R¹ is C₁-C₆-alkyl. In some embodiments, R¹ is CH₃. In some embodiments, A is substituted with 0 or 1 In some embodiments, B is substituted with 0, 1, or 2 R¹.

[0157] In some embodiments, A is a bicyclic heteroaryl and B is a monocyclic heterocyclyl. In some embodiments of Formula (I), Z is N. In some embodiments of Formula (I), each of W, X, and Z is not independently C(R³), e.g., (CH).

[0158] In some embodiments, the compound of Formula (I) is a compound of Formula (I-d):

[chemical structure]

or a pharmaceutically acceptable salt, solvate, hydrate, tautomer, or stereoisomer thereof, wherein A is a monocyclic nitrogen-containing heterocyclyl optionally substituted with one or more R¹; B is a bicyclic nitrogen-containing heteroaryl optionally substituted with one or more R¹; each R¹ is independently hydrogen, C₁-C₆-alkyl, C₂-C₆-alkenyl, C₂-C₆-alkynyl, C₁-C₆-heteroalkyl, C₁-C₆-haloalkyl, cycloalkyl, heterocyclyl, aryl, C₁-C₆ alkylene-aryl, C₁-C₆ alkenylene-aryl, C₁-C₆ alkylene-heteroaryl, heteroaryl, halo, cyano, oxo, —OR^{A}, —NR^{B}R^{C}, —NR^{B}C(O)R^{D}, —NO₂, —C(O)NR^{B}R^{C}, —C(O)R^{D}, —C(O)OR^{D}, or —S(O)ₓR^{D}, wherein each alkyl, alkylene, alkenyl, alkynyl, heteroalkyl, haloalkyl, cycloalkyl, heterocyclyl, aryl, and heteroaryl is optionally substituted with one or more R⁵; or two R¹ groups, together with the atoms to which they are attached, form a 3-7-membered cycloalkyl, heterocyclyl, aryl, or heteroaryl, wherein each cycloalkyl, heterocyclyl, aryl, and heteroaryl is optionally substituted with one or more R⁵; each R⁵ is independently C₁-C₆-alkyl, C₂-C₆-alkenyl, C₂-C₆-alkynyl, C₁-C₆-heteroalkyl, C₁-C₆-haloalkyl, cycloalkyl, heterocyclyl, aryl, heteroaryl, halo, oxo, cyano, —OR^{A}, —NR^{B}R^{C}, —NR^{B}C(O)R^{D}, —NO₂, —C(O)NR^{B}R^{C}, —C(O)R^{D}, —C(O)OR^{D}, or —S(O)ₓR^{D}, wherein each alkyl, alkenyl, alkynyl, heteroalkyl, haloalkyl, cycloalkyl, heterocyclyl, aryl, and heteroaryl is optionally substituted with one or more R⁶; each R⁶ is independently C₁-C₆-alkyl, C₁-C₆-heteroalkyl, C₁-C₆-haloalkyl, cycloalkyl, heterocyclyl, aryl, heteroaryl, halo, cyano, oxo, or —OR^{A}; each R^{A} is independently hydrogen, C₁-C₆ alkyl, C₁-C₆ haloalkyl, aryl, heteroaryl, C₁-C₆ alkylene-aryl, C₁-C₆ alkylene-heteroaryl, —C(O)R^{D}, or —S(O)ₓR^{D}; each R^{B} and R^{C} is independently hydrogen, C₁-C₆ alkyl, C₁-C₆ heteroalkyl, cycloalkyl, heterocyclyl, —OR^{A}; or R^{B} and R^{C} together with the atom to which they are attached form a 3-7-membered heterocyclyl ring optionally substituted with one or more R¹⁰; each R^{D} is independently hydrogen, C₁-C₆ alkyl, C₂-C₆ alkenyl, C₂-C₆ alkynyl, C₁-C₆ heteroalkyl, C₁-C₆ haloalkyl, cycloalkyl, heterocyclyl, aryl, heteroaryl, C₁-C₆ alkylene-aryl, or C₁-C₆ alkylene-heteroaryl; each le° is independently C₁-C₆-alkyl or halo; and x is 0, 1, or 2.

[0159] In some embodiments, A is heterocyclyl optionally substituted with one or more R¹. In some embodiments, A is monocyclic nitrogen-containing heterocyclyl. In some embodiments, A is optionally substituted piperidinyl. In some embodiments, A is selected from

[chemical structure]

wherein R¹ is as defined herein.

[0160] In some embodiments, A is selected from,

[chemical structure]

wherein R¹ is as defined herein.

[0161] In some embodiments, A is selected from

[chemical structure]

[0162] In some embodiments, A is heteroaryl. In some embodiments, A is a nitrogen-containing heteroaryl. In some embodiments, A is a bicyclic nitrogen-containing heteroaryl.

[0163] In some embodiments, A is selected from

[chemical structure]

In some embodiments, A is

[chemical structure]

wherein R¹ is as defined herein. In some embodiments, A is selected from

[chemical structure]

[0164] In some embodiments, A is

[chemical structure]

In some embodiments, A is

[chemical structure]

In some embodiments, A is

[chemical structure]

In some embodiments, A is

[chemical structure]

In some embodiments, A is

[chemical structure]

In some embodiments, A is

[chemical structure]

In some embodiments, A is

[chemical structure]

In some embodiments, A is

[chemical structure]

In some embodiments, A is

[chemical structure]

[0165] In some embodiments, B is heteroaryl. In some embodiments, B is a nitrogen-containing heteroaryl. In some embodiments, B is a bicyclic nitrogen-containing heteroaryl. In some embodiments, B is selected from

[chemical structure]

In some embodiments, B is

[chemical structure]

wherein R¹ is as defined herein.

[0166] In some embodiments, B is selected from

[chemical structure]

[0167] In some embodiments, B is heterocyclyl. In some embodiments, B is a nitrogen-containing heterocyclyl. In some embodiments, B is a monocyclic nitrogen-containing heterocyclyl or a bicyclic nitrogen-containing heterocyclyl. In some embodiments, B is selected from

[chemical structure]

wherein R¹ is as defined herein. In some embodiments, B is selected from

[chemical structure]

wherein R¹ is as defined herein. In some embodiments, B is selected from,

[chemical structure]

wherein R¹ is as defined herein.

[0168] In some embodiments, B is selected from

[chemical structure]

[0169] In some embodiments, B is

[chemical structure]

In some embodiments, B is

[chemical structure]

In some embodiments, B is

[chemical structure]

In some embodiments, B is

[chemical structure]

In some embodiments, B is

[chemical structure]

In some embodiments, B is

[chemical structure]

In some embodiments, B is

[chemical structure]

In some embodiments, B is

[chemical structure]

In some embodiments, B is

[chemical structure]

In some embodiments, B is

[chemical structure]

In some embodiments, B is

[chemical structure]

In some embodiments, B is

[chemical structure]

In some embodiments, B is

[chemical structure]

In some embodiments, B is

[chemical structure]

[0170] In some embodiments, R¹ is C₁-C₆-alkyl. In some embodiments, R¹ is CH₃. In some embodiments, A is substituted with 0 or 1 R¹. In some embodiments, B is substituted with 0, 1, or 2 R¹.

[0171] In some embodiments, the compound of Formula (I) is selected from a compound in Table 1, or a pharmaceutically acceptable salt, solvate, hydrate, tautomer, or stereoisomer thereof.

TABLE 1
Exemplary compounds of Formula (I)

| Compound No. | Structure |
|---|---|
| 100 | [chemical structure] |
| 101 | [chemical structure] |
| 102 | [chemical structure] |
| 103 | [chemical structure] |
| 104 | [chemical structure] |
| 105 | [chemical structure] |
| 106 | [chemical structure] |
| 107 | [chemical structure] |
| 108 | [chemical structure] |
| 109 | [chemical structure] |
| 110 | [chemical structure] |
| 111 | [chemical structure] |
| 112 | [chemical structure] |
| 113 | [chemical structure] |
| 114 | [chemical structure] |
| 115 | [chemical structure] |
| 116 | [chemical structure] |
| 117 | [chemical structure] |
| 118 | [chemical structure] |
| 119 | [chemical structure] |
| 120 | [chemical structure] |
| 121 | [chemical structure] |
| 122 | [chemical structure] |
| 123 | [chemical structure] |
| 124 | [chemical structure] |
| 125 | [chemical structure] |
| 126 | [chemical structure] |
| 127 | [chemical structure] |
| 128 | [chemical structure] |
| 129 | [chemical structure] |
| 130 | [chemical structure] |
| 131 | [chemical structure] |
| 132 | [chemical structure] |
| 133 | [chemical structure] |
| 134 | [chemical structure] |
| 135 | [chemical structure] |
| 136 | [chemical structure] |
| 137 | [chemical structure] |
| 138 | [chemical structure] |
| 139 | [chemical structure] |
| 140 | [chemical structure] |
| 141 | [chemical structure] |
| 142 | [chemical structure] |
| 143 | [chemical structure] |
| 144 | [chemical structure] |
| 145 | [chemical structure] |
| 146 | [chemical structure] |
| 147 | [chemical structure] |
| 165 | [chemical structure] |
| 166 | [chemical structure] |
| 167 | [chemical structure] |
| 189 | [chemical structure] |
| 190 | [chemical structure] |
| 191 | [chemical structure] |
| 192 | [chemical structure] |
| 193 | [chemical structure] |
| 238 | [chemical structure] |
| 239 | [chemical structure] |

[0172] In some embodiments, for Formula (I), A is monocyclic heterocyclyl (e.g., N-methyl piperidinyl); B is bicyclic heteroaryl (e.g., 2-methyl-2H-indazolyl); L¹ and L² are each absent; X, W, and Z are each independently C(R³) (e.g., CH); Y is N(R^{4a}) (e.g., NH); and R² is absent. In some embodiments, the compound of Formula (I), (I-a), (I-b), and (I-c) is Compound 100, or a pharmaceutically acceptable salt, solvate, hydrate, tautomer, or stereoisomer thereof.

[0173] In some embodiments, for Formula (I), A is monocyclic heterocyclyl (e.g., N-methyl piperidinyl); B is bicyclic heteroaryl (e.g., 2,7-dimethyl-2H-indazolyl); L¹ and L² are each absent; X, W, and Z are each independently C(R³) (e.g., CH); Y is N(R^{4a}) (e.g., NH); and R² is absent. In some embodiments, the compound of Formula (I), (I-a), (I-b), and (I-c) is Compound 101, or a pharmaceutically acceptable salt, solvate, hydrate, tautomer, or stereoisomer thereof.

[0174] In some embodiments, for Formula (I), A is monocyclic heterocyclyl (e.g., N-methyl piperidinyl); B is bicyclic heteroaryl (e.g., 7-fluoro-2-methyl-2H-indazolyl); L¹ and L² are each absent; X, W, and Z are each independently C(R³) (e.g., CH); Y is N(R^{4a}) (e.g., NH); and R² is absent. In some embodiments, the compound of Formula (I), (I-a), (I-b), and (I-c) is Compound 102, or a pharmaceutically acceptable salt, solvate, hydrate, tautomer, or stereoisomer thereof.

[0175] In some embodiments, for Formula (I), A is monocyclic heterocyclyl (e.g., N-methyl piperidinyl); B is bicyclic heteroaryl (e.g., 8-fluoro-2-methylimidazo[1,2-a]pyridinyl); L¹ and L² are each absent; X, W, and Z are each independently C(R³) (e.g., CH); Y is N(R^{4a}) (e.g., NH); and R² is absent. In some embodiments, the compound of Formula (I), (I-a), (I-b), and (I-c) is Compound 103, or a pharmaceutically acceptable salt, solvate, hydrate, tautomer, or stereoisomer thereof.

[0176] In some embodiments, for Formula (I), A is monocyclic heterocyclyl (e.g., piperidinyl); B is bicyclic heteroaryl (e.g., 2-methyl-2H-indazolyl); L¹ and L² are each absent; X, W, and Z are each independently C(R³) (e.g., CH); Y is N(R^{4a}) (e.g., NH); and R² is absent. In some embodiments, the compound of Formula (I), (I-a), (I-b), and (I-c) is Compound 104, or a pharmaceutically acceptable salt, solvate, hydrate, tautomer, or stereoisomer thereof.

[0177] In some embodiments, for Formula (I), A is monocyclic heterocyclyl (e.g., piperidinyl); B is bicyclic heteroaryl (e.g., 2,7-dimethyl-2H-indazolyl); L¹ and L² are each absent; X, W, and Z are each independently C(R³) (e.g., CH); Y is N(R^{4a}) (e.g., NH); and R² is absent. In some embodiments, the compound of Formula (I), (I-a), (I-b), and (I-c) is Compound 105, or a pharmaceutically acceptable salt, solvate, hydrate, tautomer, or stereoisomer thereof.

[0178] In some embodiments, for Formula (I), A is monocyclic heterocyclyl (e.g., piperidinyl); B is bicyclic heteroaryl (e.g., 7-fluoro-2-methyl-2H-indazolyl); L¹ and L² are each absent; X, W, and Z are each independently C(R³) (e.g., CH); Y is N(R^{4a}) (e.g., NH); and R² is absent. In some embodiments, the compound of Formula (I), (I-a), (I-b), and (I-c) is Compound 106, or a pharmaceutically acceptable salt, solvate, hydrate, tautomer, or stereoisomer thereof.

[0179] In some embodiments, for Formula (I), A is monocyclic heterocyclyl (e.g., piperidinyl); B is bicyclic heteroaryl (e.g., 8-fluoro-2-methylimidazo[1,2-a]pyridinyl); L¹ and L² are each absent; X, W, and Z are each independently C(R³) (e.g., CH); Y is N(R^{4a}) (e.g., NH); and R² is absent. In some embodiments, the compound of Formula (I), (I-a), (I-b), and (I-c) is Compound 107, or a pharmaceutically acceptable salt, solvate, hydrate, tautomer, or stereoisomer thereof.

[0180] In some embodiments, for Formula (I), A is monocyclic heterocyclyl (e.g., N-methyl piperazinyl); B is bicyclic heteroaryl (e.g., 2-methyl-2H-indazolyl); L¹ and L² are each absent; X, W, and Z are each independently C(R³) (e.g., CH); Y is N(R^{4a}) (e.g., NH); and R² is absent. In some embodiments, the compound of Formula (I), (I-a), (I-b), and (I-c) is Compound 108, or a pharmaceutically acceptable salt, solvate, hydrate, tautomer, or stereoisomer thereof.

[0181] In some embodiments, for Formula (I), A is monocyclic heterocyclyl (e.g., N-methyl piperazinyl); B is bicyclic heteroaryl (e.g., 2,7-dimethyl-2H-indazolyl); L¹ and L² are each absent; X, W, and Z are each independently C(R³) (e.g., CH); Y is N(R^{4a}) (e.g., NH); and R² is absent. In some embodiments, the compound of Formula (I), (I-a), (I-b), and (I-c) is Compound 109, or a pharmaceutically acceptable salt, solvate, hydrate, tautomer, or stereoisomer thereof.

[0182] In some embodiments, for Formula (I), A is monocyclic heterocyclyl (e.g., N-methyl piperazinyl); B is bicyclic heteroaryl (e.g., 7-fluoro-2-methyl-2H-indazolyl); L¹ and L² are each absent; X, W, and Z are each independently C(R³) (e.g., CH); Y is N(R^{4a}) (e.g., NH); and R² is absent. In some embodiments, the compound of Formula (I), (I-a), (I-b), and (I-c) is Compound 110, or a pharmaceutically acceptable salt, solvate, hydrate, tautomer, or stereoisomer thereof.

[0183] In some embodiments, for Formula (I), A is monocyclic heterocyclyl (e.g., N-methyl piperazinyl); B is bicyclic heteroaryl (e.g., 8-fluoro-2-methylimidazo[1,2-a]pyridinyl); L¹ and L² are each absent; X, W, and Z are each independently C(R³) (e.g., CH); Y is N(R^{4a}) (e.g., NH); and R² is absent. In some embodiments, the compound of Formula (I), (I-a), (I-b), and (I-c) is Compound 111, or a pharmaceutically acceptable salt, solvate, hydrate, tautomer, or stereoisomer thereof.

[0184] In some embodiments, for Formula (I), A is monocyclic heterocyclyl (e.g., piperazinyl); B is bicyclic heteroaryl (e.g., 2-methyl-2H-indazolyl); L¹ and L² are each absent; X, W, and Z are each independently C(R³) (e.g., CH); Y is N(R^{4a}) (e.g., NH); and R² is absent. In some embodiments, the compound of Formula (I), (I-a), (I-b), and (I-c) is Compound 112, or a pharmaceutically acceptable salt, solvate, hydrate, tautomer, or stereoisomer thereof.

[0185] In some embodiments, for Formula (I), A is monocyclic heterocyclyl (e.g., piperazinyl); B is bicyclic heteroaryl (e.g., 2,7-dimethyl-2H-indazolyl); L¹ and L² are each absent; X, W, and Z are each independently C(R³) (e.g., CH); Y is N(R^{4a}) (e.g., NH); and R² is absent. In some embodiments, the compound of Formula (I), (I-a), (I-b), and (I-c) is Compound 113, or a pharmaceutically acceptable salt, solvate, hydrate, tautomer, or stereoisomer thereof.

[0186] In some embodiments, for Formula (I), A is monocyclic heterocyclyl (e.g., piperazinyl); B is bicyclic heteroaryl (e.g., 7-fluoro-2-methyl-2H-indazolyl); L¹ and L² are each absent; X, W, and Z are each independently C(R³) (e.g., CH); Y is N(R^{4a}) (e.g., NH); and R² is absent. In some embodiments, the compound of Formula (I), (I-a), (I-b), and (I-c) is Compound 114, or a pharmaceutically acceptable salt, solvate, hydrate, tautomer, or stereoisomer thereof.

[0187] In some embodiments, for Formula (I), A is monocyclic heterocyclyl (e.g., piperazinyl); B is bicyclic heteroaryl (e.g., 8-fluoro-2-methylimidazo[1,2-a]pyridinyl); L¹ and L² are each absent; X, W, and Z are each independently C(R³) (e.g., CH); Y is N(R^{4a}) (e.g., NH); and R² is absent. In some embodiments, the compound of Formula (I), (I-a), (I-b), and (I-c) is Compound 115, or a pharmaceutically acceptable salt, solvate, hydrate, tautomer, or stereoisomer thereof.

[0188] In some embodiments, for Formula (I), A is monocyclic heterocyclyl (e.g., 2,2,6,6-tetramethylpiperidinyl); B is bicyclic heteroaryl (e.g., 2-methyl-2H-indazolyl); L¹ and L² are each absent; X, W, and Z are each independently C(R³) (e.g., CH); Y is N(R^{4a}) (e.g., NH); and R² is absent. In some embodiments, the compound of Formula (I), (I-a), (I-b), and (I-c) is Compound 116, or a pharmaceutically acceptable salt, solvate, hydrate, tautomer, or stereoisomer thereof.

[0189] In some embodiments, for Formula (I), A is monocyclic heterocyclyl (e.g., 2,2,6,6-tetramethylpiperidinyl); B is bicyclic heteroaryl (e.g., 2,7-dimethyl-2H-indazolyl); L¹ and L² are each absent; X, W, and Z are each independently C(R³) (e.g., CH); Y is N(R^{4a}) (e.g., NH); and R² is absent. In some embodiments, the compound of Formula (I), (I-a), (I-b), and (I-c) is Compound 117, or a pharmaceutically acceptable salt, solvate, hydrate, tautomer, or stereoisomer thereof.

[0190] In some embodiments, for Formula (I), A is monocyclic heterocyclyl (e.g., 2,2,6,6-tetramethylpiperidinyl); B is bicyclic heteroaryl (e.g., 7-fluoro-2-methyl-2H-indazolyl); L¹ and L² are each absent; X, W, and Z are each independently C(R³) (e.g., CH); Y is N(R^{4a}) (e.g., NH); and R² is absent. In some embodiments, the compound of Formula (I), (I-a), (I-b), and (I-c) is Compound 118, or a pharmaceutically acceptable salt, solvate, hydrate, tautomer, or stereoisomer thereof.

[0191] In some embodiments, for Formula (I), A is monocyclic heterocyclyl (e.g., 2,2,6,6-tetramethylpiperidinyl); B is bicyclic heteroaryl (e.g., 8-fluoro-2-methylimidazo[1,2-a]pyridinyl); L¹ and L² are each absent; X, W, and Z are each independently C(R³) (e.g., CH); Y is N(R^{4a}) (e.g., NH); and R² is absent. In some embodiments, the compound of Formula (I), (I-a), (I-b), and (I-c) is Compound 119, or a pharmaceutically acceptable salt, solvate, hydrate, tautomer, or stereoisomer thereof.

[0192] In some embodiments, for Formula (I), A is monocyclic heterocyclyl (e.g., piperidinyl); B is bicyclic heteroaryl (e.g., 2-methyl-2H-indazolyl); L¹ is —N(R⁸)— (e.g., —N(CH₃)—); L² is absent; X, W, and Z are each independently C(R³) (e.g., CH); Y is N(R^{4a}) (e.g., NH); and R² is absent. In some embodiments, the compound of Formula (I), (I-a), (I-b), and (I-c) is Compound 120, or a pharmaceutically acceptable salt, solvate, hydrate, tautomer, or stereoisomer thereof.

[0193] In some embodiments, for Formula (I), A is monocyclic heterocyclyl (e.g., piperidinyl); B is bicyclic heteroaryl (e.g., 2,7-dimethyl-2H-indazolyl); L¹ is —N(R⁸)— (e.g., —N(CH₃)—); L² is absent; X, W, and Z are each independently C(R³) (e.g., CH); Y is N(R^{4a}) (e.g., NH); and R² is absent. In some embodiments, the compound of Formula (I), (I-a), (I-b), and (I-c) is Compound 121, or a pharmaceutically acceptable salt, solvate, hydrate, tautomer, or stereoisomer thereof.

[0194] In some embodiments, for Formula (I), A is monocyclic heterocyclyl (e.g., piperidinyl); B is bicyclic heteroaryl (e.g., 7-fluoro-2-methyl-2H-indazolyl); L¹ is —N(R⁸)— (e.g., —N(CH₃)—); L² is absent; X, W, and Z are each independently C(R³) (e.g., CH); Y is N(R^{4a}) (e.g., NH); and R² is absent. In some embodiments, the compound of Formula (I), (I-a), (I-b), and (I-c) is Compound 122, or a pharmaceutically acceptable salt, solvate, hydrate, tautomer, or stereoisomer thereof.

[0195] In some embodiments, for Formula (I), A is monocyclic heterocyclyl (e.g., piperidinyl); B is bicyclic heteroaryl (e.g., 8-fluoro-2-methylimidazo[1,2-a]pyridinyl); L¹ is —N(R⁸)— (e.g., —N(CH₃)—); L² is absent; X, W, and Z are each independently C(R³) (e.g., CH); Y is N(R^{4a}) (e.g., NH); and R² is absent. In some embodiments, the compound of Formula (I), (I-a), (I-b), and (I-c) is Compound 123, or a pharmaceutically acceptable salt, solvate, hydrate, tautomer, or stereoisomer thereof.

[0196] In some embodiments, for Formula (I), A is monocyclic heterocyclyl (e.g., N-methyl piperidinyl); B is bicyclic heteroaryl (e.g., 2-methyl-2H-indazolyl); L¹ and L² are each absent; X, and W are each independently C(R³) (e.g., CH); Z is N; Y is N(R^{4a}) (e.g., NH); and R² is absent. In some embodiments, the compound of Formula (I), (I-a), and (I-b) is Compound 124, or a pharmaceutically acceptable salt, solvate, hydrate, tautomer, or stereoisomer thereof.

[0197] In some embodiments, for Formula (I), A is monocyclic heterocyclyl (e.g., N-methyl piperidinyl); B is bicyclic heteroaryl (e.g., 2,7-dimethyl-2H-indazolyl); L¹ and L² are each absent; X and W are each independently C(R³) (e.g., CH); Z in N; Y is N(R^{4a}) (e.g., NH); and R² is absent. In some embodiments, the compound of Formula (I), (I-a), and (I-b) is Compound 125, or a pharmaceutically acceptable salt, solvate, hydrate, tautomer, or stereoisomer thereof.

[0198] In some embodiments, for Formula (I), A is monocyclic heterocyclyl (e.g., N-methyl piperidinyl); B is bicyclic heteroaryl (e.g., 7-fluoro-2-methyl-2H-indazolyl); L¹ and L² are each absent; X and W are each independently C(R³) (e.g., CH); Z is N; Y is N(R^{4a}) (e.g., NH); and R² is absent. In some embodiments, the compound of Formula (I), (I-a), and (I-b) is Compound 126, or a pharmaceutically acceptable salt, solvate, hydrate, tautomer, or stereoisomer thereof.

[0199] In some embodiments, for Formula (I), A is monocyclic heterocyclyl (e.g., N-methyl piperidinyl); B is bicyclic heteroaryl (e.g., 8-fluoro-2-methylimidazo[1,2-a]pyridinyl); L¹ and L² are each absent; X and W are each independently C(R³) (e.g., CH); Z is N; Y is N(R^{4a}) (e.g., NH); and R² is absent. In some embodiments, the compound of Formula (I), (I-a), and (I-b) is Compound 127, or a pharmaceutically acceptable salt, solvate, hydrate, tautomer, or stereoisomer thereof.

[0200] In some embodiments, for Formula (I), A is monocyclic heterocyclyl (e.g., piperidinyl); B is bicyclic heteroaryl (e.g., 2-methyl-2H-indazolyl); L¹ and L² are each absent; X, and W are each independently C(R³) (e.g., CH); Z is N; Y is N(R^{4a}) (e.g., NH); and R² is absent. In some embodiments, the compound of Formula (I), (I-a), and (I-b) is Compound 128, or a pharmaceutically acceptable salt, solvate, hydrate, tautomer, or stereoisomer thereof.

[0201] In some embodiments, for Formula (I), A is monocyclic heterocyclyl (e.g., piperidinyl); B is bicyclic heteroaryl (e.g., 2,7-dimethyl-2H-indazolyl); L¹ and L² are each absent; X and W are each independently C(R³) (e.g., CH); Z in N; Y is N(R^{4a}) (e.g., NH); and R² is absent. In some embodiments, the compound of Formula (I), (I-a), and (I-b) is Compound 129, or a pharmaceutically acceptable salt, solvate, hydrate, tautomer, or stereoisomer thereof.

[0202] In some embodiments, for Formula (I), A is monocyclic heterocyclyl (e.g., piperidinyl); B is bicyclic heteroaryl (e.g., 7-fluoro-2-methyl-2H-indazolyl); L¹ and L² are each absent; X and W are each independently C(R³) (e.g., CH); Z is N; Y is N(R^{4a}) (e.g., NH); and R² is absent. In some embodiments, the compound of Formula (I), (I-a), and (I-b) is Compound 130, or a pharmaceutically acceptable salt, solvate, hydrate, tautomer, or stereoisomer thereof.

[0203] In some embodiments, for Formula (I), A is monocyclic heterocyclyl (e.g., piperidinyl); B is bicyclic heteroaryl (e.g., 8-fluoro-2-methylimidazo[1,2-a]pyridinyl); L¹ and L² are each absent; X and W are each independently C(R³) (e.g., CH); Z is N; Y is N(R^{4a}) (e.g., NH); and R² is absent. In some embodiments, the compound of Formula (I), (I-a), and (I-b) is Compound 131, or a pharmaceutically acceptable salt, solvate, hydrate, tautomer, or stereoisomer thereof.

[0204] In some embodiments, for Formula (I), A is monocyclic heterocyclyl (e.g., N-methyl piperazyl); B is bicyclic heteroaryl (e.g., 2-methyl-2H-indazolyl); L¹ and L² are each absent; X, and W are each independently C(R³) (e.g., CH); Z is N; Y is N(R^{4a}) (e.g., NH); and R² is absent.

[0205] In some embodiments, the compound of Formula (I), (I-a), and (I-b) is Compound 132, or a pharmaceutically acceptable salt, solvate, hydrate, tautomer, or stereoisomer thereof. In some embodiments, for Formula (I), A is monocyclic heterocyclyl (e.g., N-methyl piperazyl); B is bicyclic heteroaryl (e.g., 2,7-dimethyl-2H-indazolyl); L¹ and L² are each absent; X and W are each independently C(R³) (e.g., CH); Z in N; Y is N(R^{4a}) (e.g., NH); and R² is absent. In some embodiments, the compound of Formula (I), (I-a), and (I-b) is Compound 133, or a pharmaceutically acceptable salt, solvate, hydrate, tautomer, or stereoisomer thereof.

[0206] In some embodiments, for Formula (I), A is monocyclic heterocyclyl (e.g., N-methyl piperazyl); B is bicyclic heteroaryl (e.g., 7-fluoro-2-methyl-2H-indazolyl); L¹ and L² are each absent; X and W are each independently C(R³) (e.g., CH); Z is N; Y is N(R^{4a}) (e.g., NH); and R² is absent. In some embodiments, the compound of Formula (I), (I-a), and (I-b) is Compound 134, or a pharmaceutically acceptable salt, solvate, hydrate, tautomer, or stereoisomer thereof.

[0207] In some embodiments, for Formula (I), A is monocyclic heterocyclyl (e.g., N-methyl piperazyl); B is bicyclic heteroaryl (e.g., 8-fluoro-2-methylimidazo[1,2-a]pyridinyl); L¹ and L² are each absent; X and W are each independently C(R³) (e.g., CH); Z is N; Y is N(R^{4a}) (e.g., NH); and R² is absent. In some embodiments, the compound of Formula (I), (I-a), and (I-b) is Compound 135, or a pharmaceutically acceptable salt, solvate, hydrate, tautomer, or stereoisomer thereof.

[0208] In some embodiments, for Formula (I), A is monocyclic heterocyclyl (e.g., piperazyl); B is bicyclic heteroaryl (e.g., 2-methyl-2H-indazolyl); L¹ and L² are each absent; X and W are each independently C(R³) (e.g., CH); Z is N; Y is N(R^{4a}) (e.g., NH); and R² is absent. In some embodiments, the compound of Formula (I), (I-a), and (I-b) is Compound 136, or a pharmaceutically acceptable salt, solvate, hydrate, tautomer, or stereoisomer thereof.

[0209] In some embodiments, for Formula (I), A is monocyclic heterocyclyl (e.g., piperazyl); B is bicyclic heteroaryl (e.g., 2,7-dimethyl-2H-indazolyl); L¹ and L² are each absent; X and W are each independently C(R³) (e.g., CH); Z in N; Y is N(R^{4a}) (e.g., NH); and R² is absent. In some embodiments, the compound of Formula (I), (I-a), and (I-b) is Compound 137, or a pharmaceutically acceptable salt, solvate, hydrate, tautomer, or stereoisomer thereof.

[0210] In some embodiments, for Formula (I), A is monocyclic heterocyclyl (e.g., piperazyl); B is bicyclic heteroaryl (e.g., 7-fluoro-2-methyl-2H-indazolyl); L¹ and L² are each absent; X and W are each independently C(R³) (e.g., CH); Z is N; Y is N(R^{4a}) (e.g., NH); and R² is absent. In some embodiments, the compound of Formula (I), (I-a), and (I-b) is Compound 138, or a pharmaceutically acceptable salt, solvate, hydrate, tautomer, or stereoisomer thereof.

[0211] In some embodiments, for Formula (I), A is monocyclic heterocyclyl (e.g., piperazyl); B is bicyclic heteroaryl (e.g., 8-fluoro-2-methylimidazo[1,2-a]pyridinyl); L¹ and L² are each absent; X and W are each independently C(R³) (e.g., CH); Z is N; Y is N(R^{4a}) (e.g., NH); and R² is absent. In some embodiments, the compound of Formula (I), (I-a), and (I-b) is Compound 139, or a pharmaceutically acceptable salt, solvate, hydrate, tautomer, or stereoisomer thereof.

[0212] In some embodiments, for Formula (I), A is monocyclic heterocyclyl (e.g., 2,2,6,6-tetramethylpiperidinyl); B is bicyclic heteroaryl (e.g., 2-methyl-2H-indazolyl); L¹ and L² are each absent; X and W are each independently C(R³) (e.g., CH); Z is N; Y is N(R^{4a}) (e.g., NH); and R² is absent. In some embodiments, the compound of Formula (I), (I-a), and (I-b) is Compound 140, or a pharmaceutically acceptable salt, solvate, hydrate, tautomer, or stereoisomer thereof.

[0213] In some embodiments, for Formula (I), A is monocyclic heterocyclyl (e.g., 2,2,6,6-tetramethylpiperidinyl); B is bicyclic heteroaryl (e.g., 2,7-dimethyl-2H-indazolyl); L¹ and L² are each absent; X and W are each independently C(R³) (e.g., CH); Z in N; Y is N(R^{4a}) (e.g., NH); and R² is absent. In some embodiments, the compound of Formula (I), (I-a), and (I-b) is Compound 141, or a pharmaceutically acceptable salt, solvate, hydrate, tautomer, or stereoisomer thereof.

[0214] In some embodiments, for Formula (I), A is monocyclic heterocyclyl (e.g., 2,2,6,6-tetramethylpiperidinyl); B is bicyclic heteroaryl (e.g., 7-fluoro-2-methyl-2H-indazolyl); L¹ and L² are each absent; X and W are each independently C(R³) (e.g., CH); Z is N; Y is N(R^{4a}) (e.g., NH); and R² is absent. In some embodiments, the compound of Formula (I), (I-a), and (I-b) is Compound 142, or a pharmaceutically acceptable salt, solvate, hydrate, tautomer, or stereoisomer thereof.

[0215] In some embodiments, for Formula (I), A is monocyclic heterocyclyl (e.g., 2,2,6,6-tetramethylpiperidinyl); B is bicyclic heteroaryl (e.g., 8-fluoro-2-methylimidazo[1,2-a]pyridinyl); L¹ and L² are each absent; X and W are each independently C(R³) (e.g., CH); Z is N; Y is N(R^{4a}) (e.g., NH); and R² is absent. In some embodiments, the compound of Formula (I), (I-a), and (I-b) is Compound 143, or a pharmaceutically acceptable salt, solvate, hydrate, tautomer, or stereoisomer thereof.

[0216] In some embodiments, for Formula (I), A is monocyclic heterocyclyl (e.g., piperidinyl); B is bicyclic heteroaryl (e.g., 2-methyl-2H-indazolyl); L¹ is —N(R⁸)— (e.g., —N(CH₃)—); L² is absent; X and W are each independently C(R³) (e.g., CH); Z is N; Y is N(R^{4a}) (e.g., NH); and R² is absent. In some embodiments, the compound of Formula (I), (I-a), and (I-b) is Compound 144, or a pharmaceutically acceptable salt, solvate, hydrate, tautomer, or stereoisomer thereof.

[0217] In some embodiments, for Formula (I), A is monocyclic heterocyclyl (e.g., piperidinyl); B is bicyclic heteroaryl (e.g., 2,7-dimethyl-2H-indazolyl); L¹ is —N(R⁸)— (e.g., —N(CH₃)—); L² is absent; X and W are each independently C(R³) (e.g., CH); Z in N; Y is N(R^{4a}) (e.g., NH); and R² is absent. In some embodiments, the compound of Formula (I), (I-a), and (I-b) is Compound 145, or a pharmaceutically acceptable salt, solvate, hydrate, tautomer, or stereoisomer thereof.

[0218] In some embodiments, for Formula (I), A is monocyclic heterocyclyl (e.g., piperidinyl); B is bicyclic heteroaryl (e.g., 7-fluoro-2-methyl-2H-indazolyl); L¹ is —N(R⁸)— (e.g., —N(CH₃)—); L² is absent; X and W are each independently C(R³) (e.g., CH); Z is N; Y is N(R^{4a}) (e.g., NH); and R² is absent. In some embodiments, the compound of Formula (I), (I-a), and (I-b) is Compound 146, or a pharmaceutically acceptable salt, solvate, hydrate, tautomer, or stereoisomer thereof.

[0219] In some embodiments, for Formula (I), A is monocyclic heterocyclyl (e.g., piperidinyl); B is bicyclic heteroaryl (e.g., 8-fluoro-2-methylimidazo[1,2-a]pyridinyl); L¹ is —N(R⁸)— (e.g., —N(CH₃)—); L² is absent; X and W are each independently C(R³) (e.g., CH); Z is N; Y is N(R^{4a}) (e.g., NH); and R² is absent. In some embodiments, the compound of Formula (I), (I-a), and (I-b) is Compound 147, or a pharmaceutically acceptable salt, solvate, hydrate, tautomer, or stereoisomer thereof.

[0220] In some embodiments, for Formula (I), A is bicyclic heterocyclyl (e.g., 2,7-dimethyl-2H-indazolyl); B is monocyclic heteroaryl (e.g., N-methyl piperazyl); L¹ and L² are each absent; X, W, and Z are each independently C(R³) (e.g., CH); Y is N(R^{4a}) (e.g., NH); and R² is absent. In some embodiments, the compound of Formula (I), (I-a), (I-b), and (I-c) is Compound 165, or a pharmaceutically acceptable salt, solvate, hydrate, tautomer, or stereoisomer thereof.

[0221] In some embodiments, for Formula (I), A is bicyclic heterocyclyl (e.g., 2,7-dimethyl-2H-indazolyl); B is monocyclic heteroaryl (e.g., piperazyl); L¹ and L² are each absent; X, W, and Z are each independently C(R³) (e.g., CH); Y is N(R^{4a}) (e.g., NH); and R² is absent. In some embodiments, the compound of Formula (I), (I-a), (I-b), and (I-c) is Compound 166, or a pharmaceutically acceptable salt, solvate, hydrate, tautomer, or stereoisomer thereof.

[0222] In some embodiments, for Formula (I), A is bicyclic heterocyclyl (e.g., 2,7-dimethyl-2H-indazolyl); B is monocyclic heteroaryl (e.g., N-methyl piperidinyl); L¹ is absent; L² is —N(R⁸)— (e.g., —N(H)—); X, W, and Z are each independently C(R³) (e.g., CH); Y is N(R^{4a}) (e.g., NH); and R² is absent. In some embodiments, the compound of Formula (I), (I-a), (I-b), and (I-c) is Compound 167, or a pharmaceutically acceptable salt, solvate, hydrate, tautomer, or stereoisomer thereof.

[0223] In some embodiments, for Formula (I), A is bicyclic heterocyclyl (e.g., 2-methyl-2H-indazolyl); B is monocyclic heteroaryl (e.g., piperidinyl); L¹ and L² are each absent; X, W, and Z are each independently C(R³) (e.g., CH); Y is N(R^{4a}) (e.g., NH); and R² is absent. In some embodiments, the compound of Formula (I), (I-a), (I-b), and (I-c) is Compound 189, or a pharmaceutically acceptable salt, solvate, hydrate, tautomer, or stereoisomer thereof.

[0224] In some embodiments, for Formula (I), A is bicyclic heterocyclyl (e.g., 2,8-dimethylimidazo[1,2-b]pyridazyl); B is monocyclic heteroaryl (e.g., 4,7-diazaspiro[2.5]octanyl); L¹ and L² are each absent; X, W, and Z are each independently C(R³) (e.g., CH); Y is N(R^{4a}) (e.g., NH); and R² is absent. In some embodiments, the compound of Formula (I), (I-a), (I-b), and (I-c) is Compound 190, or a pharmaceutically acceptable salt, solvate, hydrate, tautomer, or stereoisomer thereof.

[0225] In some embodiments, for Formula (I), A is bicyclic heterocyclyl (e.g., 8-fluoro-2-methylimidazo[1,2-a]pyridinyl); B is monocyclic heteroaryl (e.g., 4,7-diazaspiro[2.5]octanyl); L¹ and L² are each absent; X, W, and Z are each independently C(R³) (e.g., CH); Y is N(R^{4a}) (e.g., NH); and R² is absent. In some embodiments, the compound of Formula (I), (I-a), (I-b), and (I-c) is Compound 191, or a pharmaceutically acceptable salt, solvate, hydrate, tautomer, or stereoisomer thereof.

[0226] In some embodiments, for Formula (I), A is bicyclic heterocyclyl (e.g., 2,8-dimethylimidazo[1,2-b]pyridazyl); B is monocyclic heteroaryl (e.g., piperidinyl); L¹ is absent; L² is —N(R⁸)— (e.g., —N(H)—); X, W, and Z are each independently C(R³) (e.g., CH); Y is N(R^{4a}) (e.g., NH); and R² is absent. In some embodiments, the compound of Formula (I), (I-a), (I-b), and (I-c) is Compound 192, or a pharmaceutically acceptable salt, solvate, hydrate, tautomer, or stereoisomer thereof.

[0227] In some embodiments, for Formula (I), A is bicyclic heterocyclyl (e.g., 5-fluoro methylimidazo[1,2-a]pyridinyl); B is monocyclic heteroaryl (e.g., piperidinyl); L¹ is absent; L² is —N(R⁸)— (e.g., —N(H)—); X, W, and Z are each independently C(R³) (e.g., CH); Y is N(R^{4a}) (e.g., NH); and R² is absent. In some embodiments, the compound of Formula (I), (I-a), (I-b), and (I-c) is Compound 193, or a pharmaceutically acceptable salt, solvate, hydrate, tautomer, or stereoisomer thereof.

[0228] In some embodiments, for Formula (I), A is bicyclic heterocyclyl (e.g., 8-fluoro-2-methylimidazo[1,2-a]pyridinyl); B is monocyclic heteroaryl (e.g., piperidinyl); L¹ is absent; L² is —N(R⁸)— (e.g., —N(H)—); X, W, and Z are each independently C(R³) (e.g., CH); Y is N(R^{4a}) (e.g., NH); and R² is absent. In some embodiments, the compound of Formula (I), (I-a), (I-b), and (I-c) is Compound 238, or a pharmaceutically acceptable salt, solvate, hydrate, tautomer, or stereoisomer thereof.

[0229] In some embodiments, for Formula (I), A is monocyclic heterocyclyl (e.g., N-methyl piperidinyl); B is bicyclic heteroaryl (e.g., 2,7-dimethyl-2H-indazolyl); L¹ is —N(R⁸)— (e.g., —N(CH₃)—); L² is absent; X, W, and Z are each independently C(R³) (e.g., CH); Y is N(R^{4a}) (e.g., NH); and R² is absent. In some embodiments, the compound of Formula (I), (I-a), (I-b), and (I-c) is Compound 239, or a pharmaceutically acceptable salt, solvate, hydrate, tautomer, or stereoisomer thereof.

[0230] As generally described for Formula (III), Y may be N, C, or C(R^{4b}), wherein the dashed lines in the ring comprising Y may be single or double bonds as valency permits. In some embodiments, Y is N or C. In some embodiments, Y is N (e.g., N). In some embodiments, Y is C.

[0231] In some embodiments, Z is C(R³) and Y is N. In some embodiments, Z is CH and Y is N. In some embodiments, X is C(R³) and Y is N. In some embodiments, X is CH and Y is N. In some embodiments, Z is C(R³) and Y is N. In some embodiments, Z is CH and Y is N. In some embodiments, Z and X are independently C(R³) and Y is N. In some embodiments, Z and X are independently CH and Y is N. In some embodiments, X and Z are independently C(R³) and Y is N. In some embodiments, X and Z are independently C(R³) and Y is N. In some embodiments, X and Z are independently CH and Y is N.

[0232] In some embodiments, the compound of Formula (III) is a compound of Formula (III-a):

[chemical structure]

or a pharmaceutically acceptable salt, solvate, hydrate, tautomer, or stereoisomer thereof, wherein A and B are each independently cycloalkyl, heterocyclyl, aryl, or heteroaryl, each of which is optionally substituted with one or more R¹; L¹ is absent, C₁-C₆-alkylene, C₁-C₆-heteroalkylene, —O—, —C(O)—, —N(R⁸)—, —N(R⁸)C(O)—, or —C(O)N(R⁸)—, wherein each alkylene and heteroalkylene is optionally substituted with one or more R⁹; each of X and Z is independently C(R³) or N; Y is N, C, or C(R^{4b}), wherein the dashed lines in the ring comprising Y may be single or double bonds as valency permits; each R¹ is independently hydrogen, C₁-C₆-alkyl, C₂-C₆-alkenyl, C₂-C₆-alkynyl, C₁-C₆-heteroalkyl, C₁-C₆-haloalkyl, cycloalkyl, heterocyclyl, aryl, C₁-C₆ alkylene-aryl, C₁-C₆ alkenylene-aryl, C₁-C₆ alkylene-heteroaryl, heteroaryl, halo, cyano, oxo, —OR^{A}, —NR^{B}R^{C}, NR^{B}C(O)R^{D}, NO₂, —C(O)NR^{B}R^{C}, —C(O)R^{D}, —C(O)OR^{D}, or —S(O)ₓR^{D}, wherein each alkyl, alkylene, alkenyl, alkynyl, heteroalkyl, haloalkyl, cycloalkyl, heterocyclyl, aryl, and heteroaryl is optionally substituted with one or more R⁵; or two R¹ groups, together with the atoms to which they are attached, form a 3-7-membered cycloalkyl, heterocyclyl, aryl, or heteroaryl, wherein each cycloalkyl, heterocyclyl, aryl, and heteroaryl is optionally substituted with one or more R⁵; R² is absent, hydrogen, or C₁-C₆-alkyl; R³ is hydrogen, C₁-C₆-alkyl, C₂-C₆-alkenyl, C₂-C₆-alkynyl, C₁-C₆-heteroalkyl, C₁-C₆-haloalkyl, halo, cyano, —OR^{A}, —NR^{B}R^{C}, —C(O)R^{D}, or —C(O)OR^{D}; R^{4b} is hydrogen, C₁-C₆-alkyl, C₁-C₆-heteroalkyl, or C₁-C₆-haloalkyl; each R⁵ is independently C₁-C₆-alkyl, C₂-C₆-alkenyl, C₂-C₆-alkynyl, C₁-C₆-heteroalkyl, C₁-C₆-haloalkyl, cycloalkyl, heterocyclyl, aryl, heteroaryl, halo, oxo, cyano, —OR^{A}, —NR^{B}R^{C}, —NR^{B}C(O)R^{D}, —NO₂, —C(O)NR^{B}R^{C}, —C(O)R^{D}, —C(O)OR^{D}, or —S(O)ₓR^{D}, wherein each alkyl, alkenyl, alkynyl, heteroalkyl, haloalkyl, cycloalkyl, heterocyclyl, aryl, and heteroaryl is optionally substituted with one or more R⁶; each R⁶ is independently C₁-C₆-alkyl, C₁-C₆-heteroalkyl, C₁-C₆-haloalkyl, cycloalkyl, heterocyclyl, aryl, heteroaryl, halo, cyano, oxo, or —OR^{A}; R^{7a} is hydrogen, C₁-C₆-alkyl, C₁-C₆-heteroalkyl, C₁-C₆-haloalkyl, halo, cyano, oxo, or —OR^{A}; R^{7b} is hydrogen, C₁-C₆-alkyl, C₁-C₆-heteroalkyl, C₁-C₆-haloalkyl, halo, cyano, or -OR^{A}; each R⁸ is independently hydrogen, C₁-C₆-alkyl, or C₁-C₆-haloalkyl; each R⁹ is independently C₁-C₆-alkyl, C₁-C₆-heteroalkyl, C₁-C₆-haloalkyl, cycloalkyl, halo, cyano, oxo, —OR^{A}, —NR^{B}R^{C}, —C(O)R^{D}, or —C(O)OR^{D}; each R^{A} is independently hydrogen, C₁-C₆ alkyl, C₁-C₆ haloalkyl, aryl, heteroaryl, C₁-C₆ alkylene-aryl, C₁-C₆ alkylene-heteroaryl, —C(O)R^{D}, or —S(O)ₓR^{D}; each R^{B} and R^{C} is independently hydrogen, C₁-C₆ alkyl, C₁-C₆ heteroalkyl, cycloalkyl, heterocyclyl, —OR^{A}; or R^{B} and R^{C} together with the atom to which they are attached form a 3-7-membered heterocyclyl ring optionally substituted with one or more R¹⁰; each R^{D} is independently hydrogen, C₁-C₆ alkyl, C₂-C₆ alkenyl, C₂-C₆ alkynyl, C₁-C₆ heteroalkyl, C₁-C₆ haloalkyl, cycloalkyl, heterocyclyl, aryl, heteroaryl, C₁-C₆ alkylene-aryl, or C₁-C₆ alkylene-heteroaryl; each R¹⁰ is independently C₁-C₆-alkyl or halo; and x is 0, 1, or 2.

[0233] In some embodiments, A is heterocyclyl optionally substituted with one or more R¹. In some embodiments, A is monocyclic nitrogen-containing heterocyclyl. In some embodiments, A is optionally substituted piperidinyl. In some embodiments, A is

[chemical structure]

wherein each R¹ is independently hydrogen or C₁-C₆-alkyl. In some embodiments, A is

[chemical structure]

In some embodiments, A is

[chemical structure]

In some embodiments, A is

[chemical structure]

[0234] In some embodiments, A is heteroaryl optionally substituted with one or more R¹. In some embodiments, A is bicyclic nitrogen-containing heteroaryl. In some embodiments, A is optionally substituted indazolyl. In some embodiments, A is optionally substituted imidazo[1,2-a]pyridinyl. In some embodiments, A is

[chemical structure]

wherein each R¹ is as defined herein. In some embodiments, A is

[chemical structure]

In some embodiments, A is

[chemical structure]

wherein each R¹ is as defined herein. In some embodiments, A is

[chemical structure]

In some embodiments, A is

[chemical structure]

[0235] In some embodiments, B is heteroaryl optionally substituted with one or more R¹. In some embodiments, B is bicyclic nitrogen-containing heteroaryl. In some embodiments, B is optionally substituted indazolyl. In some embodiments, B is selected from

[chemical structure]

In some embodiments, B is selected from

[chemical structure]

In some embodiments, B is

[chemical structure]

In some embodiments, B is

[chemical structure]

In some embodiments, B is

[chemical structure]

[0236] In some embodiments, B is heterocyclyl optionally substituted with one or more R¹. In some embodiments, B is monocyclic nitrogen-containing heterocyclyl. In some embodiments, B is optionally substituted piperazinyl. In some embodiments, B is

[chemical structure]

wherein R¹ is as defined herein. In some embodiments, B is

[chemical structure]

In some embodiments, B is

[chemical structure]

[0237] As generally described, Y may be N, C, or C(R^{4b}), wherein the dashed lines in the ring comprising Y may be single or double bonds as valency permits. In some embodiments, Y is N. In some embodiments, Y is C. In some embodiments, Y is C(R^{4b}) (e.g., CH).

[0238] In some embodiments, L¹ is absent or N(CH₃). In some embodiments, L¹ is absent. In some embodiments, L¹ is N(CH₃).

[0239] In some embodiments, each of R^{7a} and R^{7b} is independently hydrogen.

[0240] In some embodiments, R² is absent. In some embodiments, R⁷ is hydrogen.

[0241] In some embodiments, R¹ is C₁-C₆-alkyl. In some embodiments, R¹ is CH₃. In some embodiments, A is substituted with 0 or 1 In some embodiments, B is substituted with 0, 1, or 2 R¹.

[0242] In some embodiments, the compound of Formula (III) is a compound of Formula (III-b):

[chemical structure]

or a pharmaceutically acceptable salt, solvate, hydrate, tautomer, or stereoisomer thereof, wherein A and B are each independently cycloalkyl, heterocyclyl, aryl, or heteroaryl, each of which is optionally substituted with one or more R¹; L¹ is absent, C₁-C₆-alkylene, C₁-C₆-heteroalkylene, —O—, —C(O)—, —N(R⁸)—, —N(R⁸)C(O)—, or —C(O)N(R⁸)—, wherein each alkylene and heteroalkylene is optionally substituted with one or more R⁹; each of X and Z is independently C(R³) or N; each R¹ is independently hydrogen, C₁-C₆-alkyl, C₂-C₆-alkenyl, C₂-C₆-alkynyl, C₁-C₆-heteroalkyl, C₁-C₆-haloalkyl, cycloalkyl, heterocyclyl, aryl, C₁-C₆ alkylene-aryl, C₁-C₆ alkenylene-aryl, C₁-C₆ alkylene-heteroaryl, heteroaryl, halo, cyano, oxo, —OR^{A}, —NR^{B}R^{C}, —NR^{B}C(O)R^{D}, —NO₂, —C(O)NR^{B}R^{C}, —C(O)R^{D}, —C(O)OR^{D}, or —S(O)ₓR^{D}, wherein each alkyl, alkylene, alkenyl, alkynyl, heteroalkyl, haloalkyl, cycloalkyl, heterocyclyl, aryl, and heteroaryl is optionally substituted with one or more R⁵; or two R¹ groups, together with the atoms to which they are attached, form a 3-7-membered cycloalkyl, heterocyclyl, aryl, or heteroaryl, wherein each cycloalkyl, heterocyclyl, aryl, and heteroaryl is optionally substituted with one or more R⁵; R³ is hydrogen, C₁-C₆-alkyl, C₂-C₆-alkenyl, C₂-C₆-alkynyl, C₁-C₆-heteroalkyl, C₁-C₆-haloalkyl, halo, cyano, —OR^{A}, —NR^{B}R^{C}, —C(O)R^{D}, or —C(O)OR^{D}; each R⁵ is independently C₁-C₆-alkyl, C₂-C₆-alkenyl, C₂-C₆-alkynyl, C₁-C₆-heteroalkyl, C₁-C₆-haloalkyl, cycloalkyl, heterocyclyl, aryl, heteroaryl, halo, oxo, cyano, —OR^{A}, —NR^{B}R^{C}, —NR^{B}C(O)R^{D}, —NO₂, —C(O)NR^{B}R^{C}, —C(O)R^{D}, —C(O)OR^{D}, or —S(O)ₓR^{D}, wherein each alkyl, alkenyl, alkynyl, heteroalkyl, haloalkyl, cycloalkyl, heterocyclyl, aryl, and heteroaryl is optionally substituted with one or more R⁶; each R⁶ is independently C₁-C₆-alkyl, C₁-C₆-heteroalkyl, C₁-C₆-haloalkyl, cycloalkyl, heterocyclyl, aryl, heteroaryl, halo, cyano, oxo, or —OR^{A}; R^{7a} is hydrogen, C₁-C₆-alkyl, C₁-C₆-heteroalkyl, C₁-C₆-haloalkyl, halo, cyano, oxo, or —OR^{A}; R^{7b} is hydrogen, C₁-C₆-alkyl, C₁-C₆-heteroalkyl, C₁-C₆-haloalkyl, halo, cyano, or —OR^{A}; each R⁸ is independently hydrogen, C₁-C₆-alkyl, or C₁-C₆-haloalkyl; each R⁹ is independently C₁-C₆-alkyl, C₁-C₆-heteroalkyl, C₁-C₆-haloalkyl, cycloalkyl, halo, cyano, oxo, —OR^{A}, —NR^{B}R^{C}, —C(O)R^{D}, or —C(O)OR^{D}; each R^{A} is independently hydrogen, C₁-C₆ alkyl, C₁-C₆ haloalkyl, aryl, heteroaryl, C₁-C₆ alkylene-aryl, C₁-C₆ alkylene-heteroaryl, —C(O)R^{D}, or —S(O)ₓR^{D}; each R^{B} and R^{C} is independently hydrogen, C₁-C₆ alkyl, C₁-C₆ heteroalkyl, cycloalkyl, heterocyclyl, —OR^{A}; or R^{B} and R^{C} together with the atom to which they are attached form a 3-7-membered heterocyclyl ring optionally substituted with one or more R¹⁰; each R^{D} is independently hydrogen, C₁-C₆ alkyl, C₂-C₆ alkenyl, C₂-C₆ alkynyl, C₁-C₆ heteroalkyl, C₁-C₆ haloalkyl, cycloalkyl, heterocyclyl, aryl, heteroaryl, C₁-C₆ alkylene-aryl, or C₁-C₆ alkylene-heteroaryl; each le° is independently C₁-C₆-alkyl or halo; and x is 0, 1, or 2.

[0243] In some embodiments, A is heterocyclyl optionally substituted with one or more R¹. In some embodiments, A is monocyclic nitrogen-containing heterocyclyl. In some embodiments, A is optionally substituted piperidinyl. In some embodiments, A is

[chemical structure]

wherein each R¹ is independently hydrogen or C₁-C₆-alkyl. In some embodiments, A is

[chemical structure]

In some embodiments, A is

[chemical structure]

In some embodiments, A is

[chemical structure]

[0244] In some embodiments, A is heteroaryl optionally substituted with one or more R¹. In some embodiments, A is bicyclic nitrogen-containing heteroaryl. In some embodiments, A is optionally substituted indazolyl. In some embodiments, A is optionally substituted imidazo[1,2-a]pyridinyl. In some embodiments, A is

[chemical structure]

wherein each R¹ is as defined herein. In some embodiments, A is

[chemical structure]

In some embodiments, A is

[chemical structure]

wherein each R¹ is as defined herein. In some embodiments, A is

[chemical structure]

[0245] In some embodiments, A is

[chemical structure]

[0246] In some embodiments, B is heteroaryl optionally substituted with one or more R¹. In some embodiments, B is bicyclic nitrogen-containing heteroaryl. In some embodiments, B is optionally substituted indazolyl. In some embodiments, B is selected from

[chemical structure]

In some embodiments, B is selected from

[chemical structure]

In some embodiments, B is

[chemical structure]

In some embodiments, B is

[chemical structure]

[0247] In some embodiments, B is heterocyclyl optionally substituted with one or more R¹. In some embodiments, B is monocyclic nitrogen-containing heterocyclyl. In some embodiments, B is optionally substituted piperazinyl. In some embodiments, B is

[chemical structure]

wherein R¹ is as defined herein. In some embodiments, B is

[chemical structure]

In some embodiments, B is

[chemical structure]

[0248] In some embodiments, L¹ is absent.

[0249] In some embodiments, each of X and Z may independently be N or C(R³). In some embodiments, X is C(R³) (e.g., CH). In some embodiments, X is N. In some embodiments, Z is C(R³) (e.g., CH). In some embodiments, Z is N. In some embodiments, each of X and Z is independently C(R³) (e.g., CH). In some embodiments, each of X and Z is independently C(R³) (e.g., CH).

[0250] In some embodiments, R¹ is C₁-C₆-alkyl. In some embodiments, R¹ is CH₃. In some embodiments, A is substituted with 0 or 1 In some embodiments, B is substituted with 0, 1, or 2 R¹.

[0251] In some embodiments, each of R^{7a} and R^{7b} is independently hydrogen. In some embodiments, the compound of Formula (III) is a compound of Formula (III-c):

[chemical structure]

or a pharmaceutically acceptable salt, solvate, hydrate, tautomer, or stereoisomer thereof, wherein A and B are each independently cycloalkyl, heterocyclyl, aryl, or heteroaryl, each of which is optionally substituted with one or more R¹; Y is N, C, or C(R^{4b}), wherein the dashed lines in the ring comprising Y may be single or double bonds as valency permits; each R¹ is independently hydrogen, C₁-C₆-alkyl, C₂-C₆-alkenyl, C₂-C₆-alkynyl, C₁-C₆-heteroalkyl, C₁-C₆-haloalkyl, cycloalkyl, heterocyclyl, aryl, C₁-C₆ alkylene-aryl, C₁-C₆ alkenylene-aryl, C₁-C₆ alkylene-heteroaryl, heteroaryl, halo, cyano, oxo, —OR^{A}, —NR^{B}R^{C}, —NR^{B}C(O)R^{D}, —^{NO}₂, —C(O)NR^{B}R^{C}, —C(O)R^{D}, —C(O)OR^{D}, or —S(O)ₓR^{D}, wherein each alkyl, alkylene, alkenyl, alkynyl, heteroalkyl, haloalkyl, cycloalkyl, heterocyclyl, aryl, and heteroaryl is optionally substituted with one or more R⁵; or two R¹ groups, together with the atoms to which they are attached, form a 3-7-membered cycloalkyl, heterocyclyl, aryl, or heteroaryl, wherein each cycloalkyl, heterocyclyl, aryl, and heteroaryl is optionally substituted with one or more R⁵; R² is absent, hydrogen, or C₁-C₆-alkyl; R^{4a} is hydrogen, C₁-C₆-alkyl, C₁-C₆-heteroalkyl, or C₁-C₆-haloalkyl; each R⁵ is independently C₁-C₆-alkyl, C₂-C₆-alkenyl, C₂-C₆-alkynyl, C₁-C₆-heteroalkyl, C₁-C₆-haloalkyl, cycloalkyl, heterocyclyl, aryl, heteroaryl, halo, oxo, cyano, —OR^{A}, —NR^{B}R^{C}, —NR^{B}C(O)R^{D}, —NO₂, —C(O)NR^{B}R^{C}, —C(O)R^{D}, —C(O)OR^{D}, or —S(O)ₓR^{D}, wherein each alkyl, alkenyl, alkynyl, heteroalkyl, haloalkyl, cycloalkyl, heterocyclyl, aryl, and heteroaryl is optionally substituted with one or more R⁶; each R⁶ is independently C₁-C₆-alkyl, C₁-C₆-heteroalkyl, C₁-C₆-haloalkyl, cycloalkyl, heterocyclyl, aryl, heteroaryl, halo, cyano, oxo, or —OR^{A}; R^{7a} is hydrogen, C₁-C₆-alkyl, C₁-C₆-heteroalkyl, C₁-C₆-haloalkyl, halo, cyano, oxo, or —OR^{A}; R^{7b} is hydrogen, C₁-C₆-alkyl, C₁-C₆-heteroalkyl, C₁-C₆-haloalkyl, halo, cyano, or —OR^{A}; each R^{A} is independently hydrogen, C₁-C₆ alkyl, C₁-C₆ haloalkyl, aryl, heteroaryl, C₁-C₆ alkylene-aryl, C₁-C₆ alkylene-heteroaryl, —C(O)R^{D}, or —S(O)ₓR^{D}; each R^{B} and R^{C} is independently hydrogen, C₁-C₆ alkyl, C₁-C₆ heteroalkyl, cycloalkyl, heterocyclyl, —OR^{A}; or R^{B} and R^{C} together with the atom to which they are attached form a 3-7-membered heterocyclyl ring optionally substituted with one or more R¹⁰; each R^{D} is independently hydrogen, C₁-C₆ alkyl, C₂-C₆ alkenyl, C₂-C₆ alkynyl, C₁-C₆ heteroalkyl, C₁-C₆ haloalkyl, cycloalkyl, heterocyclyl, aryl, heteroaryl, C₁-C₆ alkylene-aryl, or C₁-C₆ alkylene-heteroaryl; each le° is independently C₁-C₆-alkyl or halo; and x is 0, 1, or 2.

[0252] In some embodiments, A is heterocyclyl optionally substituted with one or more R¹. In some embodiments, A is monocyclic nitrogen-containing heterocyclyl. In some embodiments, A is optionally substituted piperidinyl. In some embodiments, A is

[chemical structure]

wherein each R¹ is independently hydrogen or C₁-C₆-alkyl. In some embodiments, A is

[chemical structure]

In some embodiments, A is

[chemical structure]

In some embodiments, A is

[chemical structure]

[0253] In some embodiments, A is heteroaryl optionally substituted with one or more R¹. In some embodiments, A is bicyclic nitrogen-containing heteroaryl. In some embodiments, A is optionally substituted indazolyl. In some embodiments, A is optionally substituted imidazo[1,2-a]pyridinyl. In some embodiments, A is

[chemical structure]

wherein each R¹ is as defined herein. In some embodiments, A is

[chemical structure]

In some embodiments, A is

[chemical structure]

wherein each R¹ is as defined herein. In some embodiments, A is

[chemical structure]

In some embodiments, A is

[chemical structure]

[0254] In some embodiments, B is heteroaryl optionally substituted with one or more R¹. In some embodiments, B is bicyclic nitrogen-containing heteroaryl. In some embodiments, B is optionally substituted indazolyl. In some embodiments, B is selected from

[chemical structure]

In some embodiments, B is selected from

[chemical structure]

In some embodiments, B is

[chemical structure]

In some embodiments, B is

[chemical structure]

In some embodiments, B is

[chemical structure]

[0255] In some embodiments, Y is N, wherein the dashed lines in the ring comprising Y may be single or double bonds as valency permits. In some embodiments, Y is N or C(R^{4b}). In some embodiments, Y is N (e.g., N). In some embodiments, Y is C(R^{4b}) (e.g., CH).

[0256] In some embodiments, L¹ is absent.

[0257] In some embodiments, R² is absent.

[0258] In some embodiments, each of R^{7a} and R^{7b} is independently hydrogen.

[0259] In some embodiments, R¹ is C₁-C₆-alkyl. In some embodiments, R¹ is CH₃. In some embodiments, A is substituted with 0 or 1 R¹. In some embodiments, B is substituted with 0, 1, or 2 R¹.

[0260] In some embodiments, the compound of Formula (III) is selected from a compound in Table 3, or a pharmaceutically acceptable salt, solvate, hydrate, tautomer, or stereoisomer thereof.

TABLE 3
Exemplary compounds of Formula (III)

| Compound | |
|---|---|
| No. | Structure |
| 152 | [chemical structure] |
| 153 | [chemical structure] |
| 156 | [chemical structure] |
| 157 | [chemical structure] |
| 158 | [chemical structure] |
| 159 | [chemical structure] |
| 160 | [chemical structure] |
| 161 | [chemical structure] |
| 162 | [chemical structure] |
| 163 | [chemical structure] |
| 172 | [chemical structure] |
| 173 | [chemical structure] |
| 174 | [chemical structure] |
| 175 | [chemical structure] |
| 176 | [chemical structure] |
| 177 | [chemical structure] |
| 178 | [chemical structure] |
| 179 | [chemical structure] |
| 180 | [chemical structure] |
| 181 | [chemical structure] |
| 182 | [chemical structure] |
| 203 | [chemical structure] |
| 204 | [chemical structure] |
| 205 | [chemical structure] |
| 206 | [chemical structure] |
| 207 | [chemical structure] |
| 208 | [chemical structure] |
| 209 | [chemical structure] |
| 210 | [chemical structure] |
| 227 | [chemical structure] |
| 228 | [chemical structure] |
| 229 | [chemical structure] |
| 230 | [chemical structure] |
| 231 | [chemical structure] |
| 232 | [chemical structure] |
| 233 | [chemical structure] |
| 234 | [chemical structure] |
| 235 | [chemical structure] |
| 236 | [chemical structure] |
| 237 | [chemical structure] |
| 241 | [chemical structure] |
| 242 | [chemical structure] |
| 243 | [chemical structure] |
| 244 | [chemical structure] |
| 245 | [chemical structure] |
| 246 | [chemical structure] |
| 284 | [chemical structure] |
| 285 | [chemical structure] |
| 286 | [chemical structure] |
| 287 | [chemical structure] |
| 288 | [chemical structure] |
| 289 | [chemical structure] |
| 290 | [chemical structure] |
| 291 | [chemical structure] |
| 292 | [chemical structure] |
| 293 | [chemical structure] |
| 294 | [chemical structure] |
| 295 | [chemical structure] |
| 296 | [chemical structure] |
| 297 | [chemical structure] |
| 298 | [chemical structure] |
| 299 | [chemical structure] |
| 300 | [chemical structure] |
| 301 | [chemical structure] |
| 302 | [chemical structure] |
| 303 | [chemical structure] |
| 306 | [chemical structure] |
| 307 | [chemical structure] |
| 308 | [chemical structure] |
| 311 | [chemical structure] |
| 313 | [chemical structure] |
| 314 | [chemical structure] |
| 315 | [chemical structure] |
| 316 | [chemical structure] |
| 317 | [chemical structure] |
| 318 | [chemical structure] |
| 319 | [chemical structure] |
| 320 | [chemical structure] |
| 321 | [chemical structure] |
| 323 | [chemical structure] |

[0261] In some embodiments, for Formula (III), A is monocyclic heterocyclyl (e.g., N-methyl piperazyl); B is bicyclic heterocyclyl (e.g., 2-methyl-2H-indazolyl); L¹ and L² are absent; X and Z are each independently C(R³) (e.g., CH); Y is N; R² is absent; and R^{7a} and R^{7b} are each independently hydrogen. In some embodiments, the compound of Formulas (III), (III-a), (III-b), and (III-c) is Compound 152, or a pharmaceutically acceptable salt, solvate, hydrate, tautomer, or stereoisomer thereof.

[0262] In some embodiments, for Formula (III), A is monocyclic heterocyclyl (e.g., N-methyl piperazyl); B is bicyclic heterocyclyl (e.g., 2-methyl-2H-indazolyl); L¹ and L² are absent; X and Z are each independently C(R³) (e.g., CH); Y is N; R² is absent; and R^{7a} and R^{7b} are each independently hydrogen. In some embodiments, the compound of Formulas (III), (III-a), (III-b), and (III-c) is Compound 153, or a pharmaceutically acceptable salt, solvate, hydrate, tautomer, or stereoisomer thereof.

[0263] In some embodiments, for Formula (III), A is bicyclic heterocyclyl (e.g., 2,7-dimethyl-2H-indazolyl); B is monocyclic heterocyclyl (e.g., N-methyl piperidinyl); L¹ and L² are absent; X and Z are each independently C(R³) (e.g., CH); Y is N; R² is absent; and R^{7a} and R^{7b} are each independently hydrogen. In some embodiments, the compound of Formulas (III), (III-a), (III-b), and (III-c) is Compound 156, or a pharmaceutically acceptable salt, solvate, hydrate, tautomer, or stereoisomer thereof.

[0264] In some embodiments, for Formula (III), A is bicyclic heterocyclyl (e.g., 2,7-dimethyl-2H-indazolyl); B is monocyclic heterocyclyl (e.g., 2,2,6,6-tetramethylpiperidinyl); L¹ and L² are absent; X and Z are each independently C(R³) (e.g., CH); Y is N; R² is absent; and R^{7a} and R^{7b} are each independently hydrogen. In some embodiments, the compound of Formulas (III), (III-a), (III-b), and (III-c) is Compound 157, or a pharmaceutically acceptable salt, solvate, hydrate, tautomer, or stereoisomer thereof.

[0265] In some embodiments, for Formula (III), A is monocyclic heterocyclyl (e.g., 1,2,3,6-tetrahydropyridinyl); B is bicyclic heterocyclyl (e.g., 2-methyl-2H-indazolyl); L¹ and L² are absent; X and Z are each independently C(R³) (e.g., CH); Y is N; R² is absent; and R^{7a} and R^{7b} are each independently hydrogen. In some embodiments, the compound of Formulas (III), (III-a), (III-b), and (III-c) is Compound 158, or a pharmaceutically acceptable salt, solvate, hydrate, tautomer, or stereoisomer thereof.

[0266] In some embodiments, for Formula (III), A is monocyclic heterocyclyl (e.g., N-methyl 1,2,3,6-tetrahydropyridinyl); B is bicyclic heterocyclyl (e.g., 2-methyl-2H-indazolyl); L¹ and L² are absent; X and Z are each independently C(R³) (e.g., CH); Y is N; R² is absent; and R^{7a} and R^{7b} are each independently hydrogen. In some embodiments, the compound of Formulas (III), (III-a), (III-b), and (III-c) is Compound 159, or a pharmaceutically acceptable salt, solvate, hydrate, tautomer, or stereoisomer thereof.

[0267] In some embodiments, for Formula (III), A is monocyclic heterocyclyl (e.g., 8-azabicyclo[3.2.1]oct-2-enyl); B is bicyclic heterocyclyl (e.g., 2-methyl-2H-indazolyl); L¹ and L² are absent; X and Z are each independently C(R³) (e.g., CH); Y is N; R² is absent; and R^{7a} and R^{7b} are each independently hydrogen. In some embodiments, the compound of Formulas (III), (III-a), (III-b), and (III-c) is Compound 160, or a pharmaceutically acceptable salt, solvate, hydrate, tautomer, or stereoisomer thereof.

[0268] In some embodiments, for Formula (III), A is monocyclic heterocyclyl (e.g., N-methyl 8-azabicyclo[3.2.1]oct-2-enyl); B is bicyclic heterocyclyl (e.g., 2-methyl-2H-indazolyl); L¹ and L² are absent; X and Z are each independently C(R³) (e.g., CH); Y is N; R² is absent; and R^{7a} and R^{7b} are each independently hydrogen. In some embodiments, the compound of Formulas (III), (III-a), (III-b), and (III-c) is Compound 161, or a pharmaceutically acceptable salt, solvate, hydrate, tautomer, or stereoisomer thereof.

[0269] In some embodiments, for Formula (III), A is monocyclic heterocyclyl (e.g., piperidinyl); B is bicyclic heterocyclyl (e.g., 2-methyl-2H-indazolyl); L¹ is —N(R⁸)— (e.g., —NH—); L² are absent; X and Z are each independently C(R³) (e.g., CH); Y is N; R² is absent; and R^{7a} and R^{7b} are each independently hydrogen. In some embodiments, the compound of Formulas (III), (III-a), (III-b), and (III-c) is Compound 162, or a pharmaceutically acceptable salt, solvate, hydrate, tautomer, or stereoisomer thereof.

[0270] In some embodiments, for Formula (III), A is monocyclic heterocyclyl (e.g., N-methyl piperidinyl); B is bicyclic heterocyclyl (e.g., 2-methyl-2H-indazolyl); L¹ is —N(R⁸)— (e.g., —NH—); L² are absent; X and Z are each independently C(R³) (e.g., CH); Y is N; R² is absent; and R^{7a} and R^{7b} are each independently hydrogen. In some embodiments, the compound of Formulas (III), (III-a), (III-b), and (III-c) is Compound 163, or a pharmaceutically acceptable salt, solvate, hydrate, tautomer, or stereoisomer thereof.

[0271] In some embodiments, for Formula (III), A is monocyclic heterocyclyl (e.g., piperidinyl); B is bicyclic heterocyclyl (e.g., 2-methyl-2H-indazolyl); L¹ and L² are absent; X and Z are each independently C(R³) (e.g., CH); Y is N; R² is absent; and R^{7a} and R^{7b} are each independently hydrogen. In some embodiments, the compound of Formulas (III), (III-a), (III-b), and (III-c) is Compound 172, or a pharmaceutically acceptable salt, solvate, hydrate, tautomer, or stereoisomer thereof.

[0272] In some embodiments, for Formula (III), A is bicyclic heterocyclyl (e.g., 2,7-dimethyl-2H-indazolyl); B is monocyclic heterocyclyl (e.g., N-methyl piperidinyl); L¹ and L² are absent; X is C(R³) (e.g., CH); Z and Y are each independently N; R² is absent; and R^{7a} and R^{7b} are each independently hydrogen. In some embodiments, the compound of Formulas (III), (III-a), and (III-b) is Compound 173, or a pharmaceutically acceptable salt, solvate, hydrate, tautomer, or stereoisomer thereof.

[0273] In some embodiments, for Formula (III), A is bicyclic heterocyclyl (e.g., 2,7-dimethyl-2H-indazolyl); B is monocyclic heterocyclyl (e.g., piperidinyl); L¹ and L² are absent; X and Z are each independently C(R³) (e.g., CH); Y is N; R² is absent; and R^{7a} and R^{7b} are each independently hydrogen. In some embodiments, the compound of Formulas (III), (III-a), (III-b), and (III-c) is Compound 174, or a pharmaceutically acceptable salt, solvate, hydrate, tautomer, or stereoisomer thereof.

[0274] In some embodiments, for Formula (III), A is bicyclic heterocyclyl (e.g., 2,7-dimethyl-2H-indazolyl); B is monocyclic heterocyclyl (e.g., N-methyl piperazyl); L¹ and L² are absent; X and Z are each independently C(R³) (e.g., CH); Y is N; R² is absent; and R^{7a} and R^{7b} are each independently hydrogen. In some embodiments, the compound of Formulas (III), (III-a), (III-b), and (III-c) is Compound 175, or a pharmaceutically acceptable salt, solvate, hydrate, tautomer, or stereoisomer thereof.

[0275] In some embodiments, for Formula (III), A is bicyclic heterocyclyl (e.g., 2,8-dimethylimidazo[1,2-b]pyridazyl); B is monocyclic heterocyclyl (e.g., N-methyl piperidinyl); L¹ and L² are absent; X and Z are each independently C(R³) (e.g., CH); Y is N; R² is absent; and R^{7a} and R^{7b} are each independently hydrogen. In some embodiments, the compound of Formulas (III), (III-a), (III-b), and (III-c) is Compound 176, or a pharmaceutically acceptable salt, solvate, hydrate, tautomer, or stereoisomer thereof.

[0276] In some embodiments, for Formula (III), A is monocyclic heterocyclyl (e.g., N-methyl piperidinyl); B is bicyclic heterocyclyl (e.g., 2-methyl-2H-indazolyl); L¹ and L² are absent; X and Z are each independently C(R³) (e.g., CH); Y is N; R² is absent; and R^{7a} and R^{7b} are each independently hydrogen. In some embodiments, the compound of Formulas (III), (III-a), (III-b), and (III-c) is Compound 177, or a pharmaceutically acceptable salt, solvate, hydrate, tautomer, or stereoisomer thereof.

[0277] In some embodiments, for Formula (III), A is monocyclic heterocyclyl (e.g., N-methyl piperazyl); B is bicyclic heterocyclyl (e.g., 2-methyl-2H-indazolyl); L¹ and L² are absent; X and Z are each independently C(R³) (e.g., CH); Y is N; R² is absent; and R^{7a} and R^{7b} are each independently hydrogen. In some embodiments, the compound of Formulas (III), (III-a), (III-b), and (III-c) is Compound 178, or a pharmaceutically acceptable salt, solvate, hydrate, tautomer, or stereoisomer thereof.

[0278] In some embodiments, for Formula (III), A is bicyclic heterocyclyl (e.g., 2,7-dimethyl-2H-indazolyl); B is monocyclic heterocyclyl (e.g., 2,2,6,6-tetramethylpiperidinyl); L¹ and L² are absent; X and Z are each independently C(R³) (e.g., CH); Y is N; R² is absent; and R^{7a} and R^{7b} are each independently hydrogen. In some embodiments, the compound of Formulas (III), (III-a), (III-b), and (III-c) is Compound 179, or a pharmaceutically acceptable salt, solvate, hydrate, tautomer, or stereoisomer thereof.

[0279] In some embodiments, for Formula (III), A is monocyclic heterocyclyl (e.g., piperidinyl); B is bicyclic heterocyclyl (e.g., 2-methyl-2H-indazolyl); L¹ is —N(R⁸)— (e.g., —N(CH₃)—); L² is absent; X and Z are each independently C(R³) (e.g., CH); Y is N; R² is absent; and R^{7a} and R^{7b} are each independently hydrogen. In some embodiments, the compound of Formulas (III), (III-a), (III-b), and (III-c) is Compound 180, or a pharmaceutically acceptable salt, solvate, hydrate, tautomer, or stereoisomer thereof.

[0280] In some embodiments, for Formula (III), A is bicyclic heterocyclyl (e.g., 2,8-dimethylimidazo[1,2-b]pyridazinyl); B is monocyclic heterocyclyl (e.g., piperidinyl); L¹ and L² are absent; X and Z are each independently C(R³) (e.g., CH); Y is N; R² is absent; and R^{7a} and R^{7b} are each independently hydrogen. In some embodiments, the compound of Formulas (III), (III-a), (III-b), and (III-c) is Compound 181, or a pharmaceutically acceptable salt, solvate, hydrate, tautomer, or stereoisomer thereof.

[0281] In some embodiments, for Formula (III), A is bicyclic heterocyclyl (e.g., 2-methyl-2H-indazolyl); B is monocyclic heterocyclyl (e.g., piperidinyl); L¹ and L² are absent; X and Z are each independently C(R³) (e.g., CH); Y is N; R² is absent; and R^{7a} and R^{7b} are each independently hydrogen. In some embodiments, the compound of Formulas (III), (III-a), (III-b), and (III-c) is Compound 182, or a pharmaceutically acceptable salt, solvate, hydrate, tautomer, or stereoisomer thereof.

[0282] In some embodiments, for Formula (III), A is monocyclic heterocyclyl (e.g., N-methyl piperidinyl); B is bicyclic heterocyclyl (e.g., 2-methyl-2H-indazolyl); L¹ is —N(R⁸)— (e.g., —NH—); L² is absent; X and Z are each independently C(R³) (e.g., CH); Y is N; R² is absent; and R^{7a} and R^{7b} are each independently hydrogen. In some embodiments, the compound of Formulas (III), (III-a), (III-b), and (III-c) is Compound 203, or a pharmaceutically acceptable salt, solvate, hydrate, tautomer, or stereoisomer thereof.

[0283] In some embodiments, for Formula (III), A is monocyclic heterocyclyl (e.g., piperidinyl); B is bicyclic heterocyclyl (e.g., 2-methyl-2H-indazolyl); L¹ is —N(R⁸)— (e.g., —NH—); L² is absent; X and Z are each independently C(R³) (e.g., CH); Y is N; R² is absent; and R^{7a} and R^{7b} are each independently hydrogen. In some embodiments, the compound of Formulas (III), (III-a), (III-b), and (III-c) is Compound 204, or a pharmaceutically acceptable salt, solvate, hydrate, tautomer, or stereoisomer thereof.

[0284] In some embodiments, for Formula (III), A is bicyclic heterocyclyl (e.g., 8-fluoro-2-methylimidazo[1,2-a]pyridinyl); B is monocyclic heterocyclyl (e.g., piperidinyl); L¹ and L² are absent; X and Z are each independently C(R³) (e.g., CH); Y is N; R² is absent; and R^{7a} and R^{7b} are each independently hydrogen. In some embodiments, the compound of Formulas (III), (III-a), (III-b), and (III-c) is Compound 205, or a pharmaceutically acceptable salt, solvate, hydrate, tautomer, or stereoisomer thereof.

[0285] In some embodiments, for Formula (III), A is bicyclic heterocyclyl (e.g., 7-fluoro-2-methyl-2H-indazolyl); B is monocyclic heterocyclyl (e.g., piperidinyl); L¹ and L² are absent; X and Z are each independently C(R³) (e.g., CH); Y is N; R² is absent; and R^{7a} and R^{7b} are each independently hydrogen. In some embodiments, the compound of Formulas (III), (III-a), (III-b), and (III-c) is Compound 206, or a pharmaceutically acceptable salt, solvate, hydrate, tautomer, or stereoisomer thereof.

[0286] In some embodiments, for Formula (III), A is bicyclic heterocyclyl (e.g., 8-fluoro-2-methylimidazo[1,2-a]pyridinyl); B is monocyclic heterocyclyl (e.g., N-methyl piperidinyl); L¹ and L² are absent; X and Z are each independently C(R³) (e.g., CH); Y is N; R² is absent; and R^{7a} and R^{7b} are each independently hydrogen. In some embodiments, the compound of Formulas (III), (III-a), (III-b), and (III-c) is Compound 207, or a pharmaceutically acceptable salt, solvate, hydrate, tautomer, or stereoisomer thereof.

[0287] In some embodiments, for Formula (III), A is bicyclic heterocyclyl (e.g., 2-methyl-2H-indazolyl); B is monocyclic heterocyclyl (e.g., N-methyl piperidinyl); L¹ and L² are absent; X and Z are each independently C(R³) (e.g., CH); Y is N; R² is absent; and R^{7a} and R^{7b} are each independently hydrogen. In some embodiments, the compound of Formulas (III), (III-a), (III-b), and (III-c) is Compound 208, or a pharmaceutically acceptable salt, solvate, hydrate, tautomer, or stereoisomer thereof.

[0288] In some embodiments, for Formula (III), A is bicyclic heterocyclyl (e.g., 7-fluoro-2-methyl-2H-indazolyl); B is monocyclic heterocyclyl (e.g., N-methyl piperidinyl); L¹ and L² are absent; X and Z are each independently C(R³) (e.g., CH); Y is N; R² is absent; and R^{7a} and R^{7b} are each independently hydrogen. In some embodiments, the compound of Formulas (III), (III-a), (III-b), and (III-c) is Compound 209, or a pharmaceutically acceptable salt, solvate, hydrate, tautomer, or stereoisomer thereof.

[0289] In some embodiments, for Formula (III), A is bicyclic heterocyclyl (e.g., 8-fluoro-2-methylimidazo[1,2-a]pyridinyl); B is monocyclic heterocyclyl (e.g., piperidinyl); L¹ and L² are absent; X is C(R³) (e.g., CH); Z is C(R³) (e.g., CF); Y is N; R² is absent; and R^{7a} and R^{7b} are each independently hydrogen. In some embodiments, the compound of Formulas (III), (III-a), and (III-b) is Compound 210, or a pharmaceutically acceptable salt, solvate, hydrate, tautomer, or stereoisomer thereof.

[0290] In some embodiments, for Formula (III), A is bicyclic heterocyclyl (e.g., 8-fluoro-2-methylimidazo[1,2-a]pyridinyl); B is monocyclic heterocyclyl (e.g., N-methyl piperidinyl); L¹ and L² are absent; X is C(R³) (e.g., CH); Z is C(R³) (e.g., CF); Y is N; R² is absent; and R^{7a} and R^{7b} are each independently hydrogen. In some embodiments, the compound of Formulas (III), (III-a), and (III-b) is Compound 227, or a pharmaceutically acceptable salt, solvate, hydrate, tautomer, or stereoisomer thereof.

[0291] In some embodiments, for Formula (III), A is monocyclic heterocyclyl (e.g., piperazyl); B is bicyclic heterocyclyl (e.g., 8-fluoro-2-methylimidazo[1,2-a]pyridinyl); L¹ and L² are absent; X and Z are each independently C(R³) (e.g., CH); Y is N; R² is absent; and R^{7a} and R^{7b} are each independently hydrogen. In some embodiments, the compound of Formulas (III), (III-a), (III-b), and (III-c) is Compound 228, or a pharmaceutically acceptable salt, solvate, hydrate, tautomer, or stereoisomer thereof.

[0292] In some embodiments, for Formula (III), A is monocyclic heterocyclyl (e.g., N-methyl piperazyl); B is bicyclic heterocyclyl (e.g., 8-fluoro-2-methylimidazo[1,2-a]pyridinyl); L¹ and L² are absent; X and Z are each independently C(R³) (e.g., CH); Y is N; R² is absent; and R^{7a} and R^{7b} are each independently hydrogen. In some embodiments, the compound of Formulas (III), (III-a), (III-b), and (III-c) is Compound 229, or a pharmaceutically acceptable salt, solvate, hydrate, tautomer, or stereoisomer thereof.

[0293] In some embodiments, for Formula (III), A is bicyclic heterocyclyl (e.g., 8-fluoro-2-methylimidazo[1,2-a]pyridinyl); B is monocyclic heterocyclyl (e.g., piperidinyl); L¹ and L² are absent; X is C(R³) (e.g., CF); Z is C(R³) (e.g., CH); Y is N; R² is absent; and R^{7a} and R^{7b} are each independently hydrogen. In some embodiments, the compound of Formulas (III), (III-a), and (III-b) is Compound 230, or a pharmaceutically acceptable salt, solvate, hydrate, tautomer, or stereoisomer thereof.

[0294] In some embodiments, for Formula (III), A is bicyclic heterocyclyl (e.g., 8-fluoro-2-methylimidazo[1,2-a]pyridinyl); B is monocyclic heterocyclyl (e.g., N-methyl piperidinyl); L¹ and L² are absent; X is C(R³) (e.g., CF); Z is C(R³) (e.g., CH); Y is N; R² is absent; and R^{7a} and R^{7b} are each independently hydrogen. In some embodiments, the compound of Formulas (III), (III-a), and (III-b) is Compound 231, or a pharmaceutically acceptable salt, solvate, hydrate, tautomer, or stereoisomer thereof.

[0295] In some embodiments, for Formula (III), A is bicyclic heterocyclyl (e.g., 2,7-dimethyl-2H-indazolyl); B is monocyclic heterocyclyl (e.g., piperidinyl); L¹ and L² are absent; X is C(R³) (e.g., CF); Z is C(R³) (e.g., CH); Y is N; R² is absent; and R^{7a} and R^{7b} are each independently hydrogen. In some embodiments, the compound of Formulas (III), (III-a), and (III-b) is Compound 232, or a pharmaceutically acceptable salt, solvate, hydrate, tautomer, or stereoisomer thereof.

[0296] In some embodiments, for Formula (III), A is bicyclic heterocyclyl (e.g., 2,7-dimethyl-2H-indazolyl); B is monocyclic heterocyclyl (e.g., N-methyl piperidinyl); L¹ and L² are absent; X is C(R³) (e.g., CF); Z is C(R³) (e.g., CH); Y is N; R² is absent; and R^{7a} and R^{7b} are each independently hydrogen. In some embodiments, the compound of Formulas (III), (III-a), and (III-b) is Compound 233, or a pharmaceutically acceptable salt, solvate, hydrate, tautomer, or stereoisomer thereof.

[0297] In some embodiments, for Formula (III), A is bicyclic heterocyclyl (e.g., 2,7-dimethyl-2H-indazolyl); B is monocyclic heterocyclyl (e.g., piperidinyl); L¹ and L² are absent; X is C(R³) (e.g., Ch); Z is C(R³) (e.g., CF); Y is N; R² is absent; and R^{7a} and R^{7b} are each independently hydrogen. In some embodiments, the compound of Formulas (III), (III-a), and (III-b) is Compound 234, or a pharmaceutically acceptable salt, solvate, hydrate, tautomer, or stereoisomer thereof.

[0298] In some embodiments, for Formula (III), A is bicyclic heterocyclyl (e.g., 2,7-dimethyl-2H-indazolyl); B is monocyclic heterocyclyl (e.g., N-methyl piperidinyl); L¹ and L² are absent; X is C(R³) (e.g., Ch); Z is C(R³) (e.g., CF); Y is N; R² is absent; and R^{7a} and R^{7b} are each independently hydrogen. In some embodiments, the compound of Formulas (III), (III-a), and (III-b) is Compound 235, or a pharmaceutically acceptable salt, solvate, hydrate, tautomer, or stereoisomer thereof.

[0299] In some embodiments, for Formula (III), A is bicyclic heterocyclyl (e.g., 8-fluoro-2-methylimidazo[1,2-a]pyridinyl); B is monocyclic heterocyclyl (e.g., 4-azaspiro[2.5]octanyl); L¹ and L² are absent; X and Z are each independently C(R³) (e.g., CH); Y is N; R² is absent; and R^{7a} and R^{7b} are each independently hydrogen. In some embodiments, the compound of Formulas (III), (III-a), (III-b), and (III-c) is Compound 236, or a pharmaceutically acceptable salt, solvate, hydrate, tautomer, or stereoisomer thereof.

[0300] In some embodiments, for Formula (III), A is bicyclic heterocyclyl (e.g., 8-fluoro-2-methylimidazo[1,2-a]pyridinyl); B is monocyclic heterocyclyl (e.g., 2,2-dimethylpiperidinyl); L¹ and L² are absent; X and Z are each independently C(R³) (e.g., CH); Y is N; R² is absent; and R^{7a} and R^{7b} are each independently hydrogen. In some embodiments, the compound of Formulas (III), (III-a), (III-b), and (III-c) is Compound 237, or a pharmaceutically acceptable salt, solvate, hydrate, tautomer, or stereoisomer thereof.

[0301] In some embodiments, for Formula (III), A is monocyclic heterocyclyl (e.g., piperazyl); B is bicyclic heterocyclyl (e.g., 2,8-dimethylimidazo[1,2-b]pyridazyl); L¹ and L² are absent; X and Z are each independently C(R³) (e.g., CH); Y is N; R² is absent; and R^{7a} and R^{7b} are each independently hydrogen. In some embodiments, the compound of Formulas (III), (III-a), (III-b), and (III-c) is Compound 241, or a pharmaceutically acceptable salt, solvate, hydrate, tautomer, or stereoisomer thereof. In some embodiments, for Formula (III), A is bicyclic heterocyclyl (e.g., 2,8-dimethylimidazo[1,2-b]pyridazyl); B is monocyclic heterocyclyl (e.g., N-methyl piperidinyl); L¹ and L² are absent; X is C(R³) (e.g., CF); Z is C(R³) (e.g., CH); Y is N; R² is absent; and R^{7a} and R^{7b} are each independently hydrogen. In some embodiments, the compound of Formulas (III), (III-a), and (III-b) is Compound 242, or a pharmaceutically acceptable salt, solvate, hydrate, tautomer, or stereoisomer thereof.

[0302] In some embodiments, for Formula (III), A is bicyclic heterocyclyl (e.g., 2,8-dimethylimidazo[1,2-b]pyridazyl); B is monocyclic heterocyclyl (e.g., piperidinyl); L¹ and L² are absent; X is C(R³) (e.g., CF); Z is C(R³) (e.g., CH); Y is N; R² is absent; and R^{7a} and R^{7b} are each independently hydrogen. In some embodiments, the compound of Formulas (III), (III-a), and (III-b) is Compound 243, or a pharmaceutically acceptable salt, solvate, hydrate, tautomer, or stereoisomer thereof.

[0303] In some embodiments, for Formula (III), A is bicyclic heterocyclyl (e.g., 2,7-dimethylimidazo[1,2-a]pyridinyl); B is monocyclic heterocyclyl (e.g., piperidinyl); L¹ and L² are absent; X and Z are each independently C(R³) (e.g., CH); Y is N; R² is absent; and R^{7a} and R^{7b} are each independently hydrogen. In some embodiments, the compound of Formulas (III), (III-a), (III-b), and (III-c) is Compound 244, or a pharmaceutically acceptable salt, solvate, hydrate, tautomer, or stereoisomer thereof.

[0304] In some embodiments, for Formula (III), A is bicyclic heterocyclyl (e.g., 4-fluoro-2-methylbenzo[d]oxazolyl); B is monocyclic heterocyclyl (e.g., piperidinyl); L¹ and L² are absent; X and Z are each independently C(R³) (e.g., CH); Y is N; R² is absent; and R^{7a} and R^{7b} are each independently hydrogen. In some embodiments, the compound of Formulas (III), (III-a), (III-b), and (III-c) is Compound 245, or a pharmaceutically acceptable salt, solvate, hydrate, tautomer, or stereoisomer thereof.

[0305] In some embodiments, for Formula (III), A is bicyclic heterocyclyl (e.g., 2,7-dimethylimidazo[1,2-a]pyridinyl); B is monocyclic heterocyclyl (e.g., N-methyl piperidinyl); L¹ and L² are absent; X and Z are each independently C(R³) (e.g., CH); Y is N; R² is absent; and R^{7a} and R^{7b} are each independently hydrogen. In some embodiments, the compound of Formulas (III), (III-a), (III-b), and (III-c) is Compound 246, or a pharmaceutically acceptable salt, solvate, hydrate, tautomer, or stereoisomer thereof.

[0306] In some embodiments, for Formula (III), A is monocyclic heterocyclyl (e.g., pyrazolyl); B is monocyclic heterocyclyl (e.g., piperidinyl); L¹ and L² are absent; X and Z are each independently C(R³) (e.g., CH); Y is N; R² is absent; and R^{7a} and R^{7b} are each independently hydrogen. In some embodiments, the compound of Formulas (III), (III-a), (III-b), and (III-c) is Compound 284, or a pharmaceutically acceptable salt, solvate, hydrate, tautomer, or stereoisomer thereof.

[0307] In some embodiments, for Formula (III), A is bicyclic heterocyclyl (e.g., 4-fluoro-2-methylbenzo[d]thiazolyl); B is monocyclic heterocyclyl (e.g., piperidinyl); L¹ and L² are absent; X and Z are each independently C(R³) (e.g., CH); Y is N; R² is absent; and R^{7a} and R^{7b} are each independently hydrogen. In some embodiments, the compound of Formulas (III), (III-a), (III-b), and (III-c) is Compound 285, or a pharmaceutically acceptable salt, solvate, hydrate, tautomer, or stereoisomer thereof.

[0308] In some embodiments, for Formula (III), A is bicyclic heterocyclyl (e.g., 6,8-dimethylimidazo[1,2-a]pyrazyl); B is monocyclic heterocyclyl (e.g., piperidinyl); L¹ and L² are absent; X and Z are each independently C(R³) (e.g., CH); Y is N; R² is absent; and R^{7a} and R^{7b} are each independently hydrogen. In some embodiments, the compound of Formulas (III), (III-a), (III-b), and (III-c) is Compound 286, or a pharmaceutically acceptable salt, solvate, hydrate, tautomer, or stereoisomer thereof.

[0309] In some embodiments, for Formula (III), A is bicyclic heterocyclyl (e.g., 6,8-dimethyl-[1,2,4]triazolo[1,5-a]pyrazinyl); B is monocyclic heterocyclyl (e.g., piperidinyl); L¹ and L² are absent; X and Z are each independently C(R³) (e.g., CH); Y is N; R² is absent; and R^{7a} and R^{7b} are each independently hydrogen. In some embodiments, the compound of Formulas (III), (III-a), (III-b), and (III-c) is Compound 287, or a pharmaceutically acceptable salt, solvate, hydrate, tautomer, or stereoisomer thereof.

[0310] In some embodiments, for Formula (III), A is bicyclic heterocyclyl (e.g., 6,8-dimethyl-[1,2,4]triazolo[1,5-a]pyrazinyl); B is monocyclic heterocyclyl (e.g., N-methyl piperidinyl); L¹ and L² are absent; X and Z are each independently C(R³) (e.g., CH); Y is N; R² is absent; and R^{7a} and R^{7b} are each independently hydrogen. In some embodiments, the compound of Formulas (III), (III-a), (III-b), and (III-c) is Compound 288, or a pharmaceutically acceptable salt, solvate, hydrate, tautomer, or stereoisomer thereof.

[0311] In some embodiments, for Formula (III), A is bicyclic heterocyclyl (e.g., 2,8-dimethylimidazo[1,2-b]pyridazyl); B is monocyclic heterocyclyl (e.g., piperidinyl); L¹ and L² are absent; X is C(R³) (e.g., CH); Z is C(R³) (e.g., CF); Y is N; R² is absent; and R^{7a} and R^{7b} are each independently hydrogen. In some embodiments, the compound of Formulas (III), (III-a), and (III-b) is Compound 289, or a pharmaceutically acceptable salt, solvate, hydrate, tautomer, or stereoisomer thereof.

[0312] In some embodiments, for Formula (III), A is bicyclic heterocyclyl (e.g., 2,8-dimethylimidazo[1,2-b]pyridazyl); B is monocyclic heterocyclyl (e.g., N-methyl piperidinyl); L¹ and L² are absent; X is C(R³) (e.g., CH); Z is C(R³) (e.g., CF); Y is N; R² is absent; and R^{7a} and R^{7b} are each independently hydrogen. In some embodiments, the compound of Formulas (III), (III-a), and (III-b) is Compound 290, or a pharmaceutically acceptable salt, solvate, hydrate, tautomer, or stereoisomer thereof.

[0313] In some embodiments, for Formula (III), A is bicyclic heterocyclyl (e.g., 8-chloro-2-methylimidazo[1,2-a]pyridinyl); B is monocyclic heterocyclyl (e.g., piperidinyl); L¹ and L² are absent; X and Z are each independently C(R³) (e.g., CH); Y is N; R² is absent; and R^{7a} and R^{7b} are each independently hydrogen. In some embodiments, the compound of Formulas (III), (III-a), (III-b), and (III-c) is Compound 291, or a pharmaceutically acceptable salt, solvate, hydrate, tautomer, or stereoisomer thereof.

[0314] In some embodiments, for Formula (III), A is bicyclic heterocyclyl (e.g., 2,8-dimethylimidazo[1,2-a]pyridinyl); B is monocyclic heterocyclyl (e.g., piperidinyl); L¹ and L² are absent; X and Z are each independently C(R³) (e.g., CH); Y is N; R² is absent; and R^{7a} and R^{7b} are each independently hydrogen. In some embodiments, the compound of Formulas (III), (III-a), (III-b), and (III-c) is Compound 292, or a pharmaceutically acceptable salt, solvate, hydrate, tautomer, or stereoisomer thereof.

[0315] In some embodiments, for Formula (III), A is bicyclic heterocyclyl (e.g., 8-fluoro-2-methylimidazo[1,2-a]pyridinyl); B is monocyclic heterocyclyl (e.g., 2-methyl piperidinyl); L¹ and L² are absent; X and Z are each independently C(R³) (e.g., CH); Y is N; R² is absent; and R^{7a} and R^{7b} are each independently hydrogen. In some embodiments, the compound of Formulas (III), (III-a), (III-b), and (III-c) is Compound 293, 294, 295, 296, or 323, or a pharmaceutically acceptable salt, solvate, hydrate, tautomer, or stereoisomer thereof.

[0316] In some embodiments, for Formula (III), A is bicyclic heterocyclyl (e.g., 2-methylimidazo[1,2-a]pyrazyl); B is monocyclic heterocyclyl (e.g., piperidinyl); L¹ and L² are absent; X and Z are each independently C(R³) (e.g., CH); Y is N; R² is absent; and R^{7a} and R^{7b} are each independently hydrogen. In some embodiments, the compound of Formulas (III), (III-a), (III-b), and (III-c) is Compound 297, or a pharmaceutically acceptable salt, solvate, hydrate, tautomer, or stereoisomer thereof.

[0317] In some embodiments, for Formula (III), A is bicyclic heterocyclyl (e.g., 4,6-dimethylpyrazolo[1,5-a]pyrazyl); B is monocyclic heterocyclyl (e.g., piperidinyl); L¹ and L² are absent; X and Z are each independently C(R³) (e.g., CH); Y is N; R² is absent; and R^{7a} and R^{7b} are each independently hydrogen. In some embodiments, the compound of Formulas (III), (III-a), (III-b), and (III-c) is Compound 298, or a pharmaceutically acceptable salt, solvate, hydrate, tautomer, or stereoisomer thereof.

[0318] In some embodiments, for Formula (III), A is monocyclic heterocyclyl (e.g., pyrazolyl); B is monocyclic heterocyclyl (e.g., N-methyl piperidinyl); L¹ and L² are absent; X and Z are each independently C(R³) (e.g., CH); Y is N; R² is absent; and R^{7a} and R^{7b} are each independently hydrogen. In some embodiments, the compound of Formulas (III), (III-a), (III-b), and (III-c) is Compound 299, or a pharmaceutically acceptable salt, solvate, hydrate, tautomer, or stereoisomer thereof.

[0319] In some embodiments, for Formula (III), A is bicyclic heterocyclyl (e.g., 4-fluoro methylbenzo[d]oxazolyl); B is monocyclic heterocyclyl (e.g., N-methyl piperidinyl); L¹ and L² are absent; X and Z are each independently C(R³) (e.g., CH); Y is N; R² is absent; and R^{7a} and R^{7b} are each independently hydrogen. In some embodiments, the compound of Formulas (III), (III-a), (III-b), and (III-c) is Compound 300, or a pharmaceutically acceptable salt, solvate, hydrate, tautomer, or stereoisomer thereof.

[0320] In some embodiments, for Formula (III), A is bicyclic heterocyclyl (e.g., 4-fluoro-2-methylbenzo[d]thiazolyl); B is monocyclic heterocyclyl (e.g., N-methyl piperidinyl); L¹ and L² are absent; X and Z are each independently C(R³) (e.g., CH); Y is N; R² is absent; and R^{7a} and R^{7b} are each independently hydrogen. In some embodiments, the compound of Formulas (III), (III-a), (III-b), and (III-c) is Compound 301, or a pharmaceutically acceptable salt, solvate, hydrate, tautomer, or stereoisomer thereof.

[0321] In some embodiments, for Formula (III), A is bicyclic heterocyclyl (e.g., 6,8-dimethylimidazo[1,2-a]pyrazyl); B is monocyclic heterocyclyl (e.g., N-methyl piperidinyl); L¹ and L² are absent; X and Z are each independently C(R³) (e.g., CH); Y is N; R² is absent; and R^{7a} and R^{7b} are each independently hydrogen. In some embodiments, the compound of Formulas (III), (III-a), (III-b), and (III-c) is Compound 302, or a pharmaceutically acceptable salt, solvate, hydrate, tautomer, or stereoisomer thereof.

[0322] In some embodiments, for Formula (III), A is bicyclic heterocyclyl (e.g., 4,6-dimethylpyrazolo[1,5-a]pyrazyl); B is monocyclic heterocyclyl (e.g., N-methyl piperidinyl); L¹ and L² are absent; X and Z are each independently C(R³) (e.g., CH); Y is N; R² is absent; and R^{7a} and R^{7b} are each independently hydrogen. In some embodiments, the compound of Formulas (III), (III-a), (III-b), and (III-c) is Compound 303, or a pharmaceutically acceptable salt, solvate, hydrate, tautomer, or stereoisomer thereof.

[0323] In some embodiments, for Formula (III), A is bicyclic heterocyclyl (e.g., 4,6-dimethylpyrazolo[1,5-a]pyrazyl); B is monocyclic heterocyclyl (e.g., piperidinyl); L¹ and L² are absent; X and Z are each independently C(R³) (e.g., CH); Y is N; R² is absent; and R^{7a} and R^{7b} are each independently hydrogen. In some embodiments, the compound of Formulas (III), (III-a), (III-b), and (III-c) is Compound 307, or a pharmaceutically acceptable salt, solvate, hydrate, tautomer, or stereoisomer thereof.

[0324] In some embodiments, for Formula (III), A is bicyclic heterocyclyl (e.g., 2-methylimidazo[1,2-a]pyrazyl); B is monocyclic heterocyclyl (e.g., N-methyl piperidinyl); L¹ and L² are absent; X and Z are each independently C(R³) (e.g., CH); Y is N; R² is absent; and R^{7a} and R^{7b} are each independently hydrogen. In some embodiments, the compound of Formulas (III), (III-a), (III-b), and (III-c) is Compound 308, or a pharmaceutically acceptable salt, solvate, hydrate, tautomer, or stereoisomer thereof.

[0325] In some embodiments, for Formula (III), A is a bicyclic heteroaryl not containing oxygen. In some embodiments, A is a bicyclic heteroaryl substituted by one or more R¹, wherein R¹ is not halo. In some embodiments, A is not

[chemical structure]

[0326] In some embodiments, B is a nitrogen-containing heterocyclyl optionally substituted with one or more R¹, wherein R¹ is not cycloalkyl (e.g., cyclopropyl). In some embodiments, B is unsubstituted piperidinyl (e.g., 0 R¹). In some embodiments, B is not

[chemical structure]

wherein R¹ is C₁-C₆ alkyl (e.g., methyl) or cycloalkyl (e.g., cyclopropyl). In some embodiments, B is

[chemical structure]

wherein R¹ is hydrogen. In some embodiments, B is not

[chemical structure]

[0327] In some embodiments, B is not

[chemical structure]

[0328] In some embodiments, X is C(R³), wherein R³ is halo. In some embodiments, X is CF.

[0329] In some embodiments, the compound of Formula (III) is not a compound disclosed in WO 2020/004594. In some embodiments, the compound of Formula (III) is not a compound selected from

[chemical structure]

or a pharmaceutically acceptable salt thereof.

[0330] In some embodiments, the present disclosure features a compound of Formula (V-a):

[chemical structure]

or a pharmaceutically acceptable salt, solvate, hydrate, tautomer, or stereoisomer thereof, wherein A and B are each independently cycloalkyl, heterocyclyl, aryl, or heteroaryl, each of which is optionally substituted with one or more R¹; each of L¹ and L² is independently absent, C₁-C₆-alkylene, C₁-C₆-heteroalkylene, —O—, —C(O)—, —N(R⁴)—, —N(R⁴)C(O)—, or —C(O)N(R⁴)—, wherein each alkylene and heteroalkylene is optionally substituted with one or more R⁷; Y is N, C(R^{6a}), or C(R^{6a})(R^{6b}), wherein the dashed lines in the ring comprising Y may be single or double bonds as valency permits; each R¹ is independently hydrogen, C₁-C₆-alkyl, C₂-C₆-alkenyl, C₂-C₆-alkynyl, C₁-C₆-heteroalkyl, C₁-C₆-haloalkyl, cycloalkyl, heterocyclyl, aryl, C₁-C₆ alkylene-aryl, C₁-C₆ alkenylene-aryl, C₁-C₆ alkylene-heteroaryl, heteroaryl, halo, cyano, oxo, —OR^{A}, —NR^{B}R^{C}, —NR^{B}C(O)R^{D}, —NO₂, —C(O)NR^{B}R^{C}, —C(O)R^{D}, —C(O)OR^{D}, or —S(O)ₓR^{D}, wherein each alkyl, alkylene, alkenyl, alkynyl, heteroalkyl, haloalkyl, cycloalkyl, heterocyclyl, aryl, and heteroaryl is optionally substituted with one or more R⁵; or two R¹ groups, together with the atoms to which they are attached, form a 3-7-membered cycloalkyl, heterocyclyl, aryl, or heteroaryl, wherein each cycloalkyl, heterocyclyl, aryl, and heteroaryl is optionally substituted with one or more R⁵; each R² is independently hydrogen or C₁-C₆-alkyl; R³ is C₁-C₆-alkyl, C₂-C₆-alkenyl, C₂-C₆-alkynyl, C₁-C₆-heteroalkyl, C₁-C₆-haloalkyl, halo, cyano, —OR^{A}, —NR^{B}R^{C}, —C(O)R^{D}, or —C(O)OR^{D}; R⁴ is hydrogen, C₁-C₆-alkyl, or C₁-C₆-haloalkyl; each R⁵ is independently C₁-C₆-alkyl, C₂-C₆-alkenyl, C₂-C₆-alkynyl, C₁-C₆-heteroalkyl, C₁-C₆-haloalkyl, cycloalkyl, heterocyclyl, aryl, heteroaryl, halo, oxo, cyano, —OR^{A}, NR^{B}R^{C}, —NR^{B}C(O)R^{D}, —NO₂, —C(O)NR^{B}R^{C}, —C(O)R^{D}, C(O)OR^{D}, or —S(O)ₓR^{D}, wherein each alkyl, alkenyl, alkynyl, heteroalkyl, haloalkyl, cycloalkyl, heterocyclyl, aryl, and heteroaryl is optionally substituted with one or more R⁷; R^{6a} and R^{6b} is independently hydrogen, C₁-C₆-alkyl, C₁-C₆-heteroalkyl, C₁-C₆-haloalkyl, or halo; each R⁷ is independently C₁-C₆-alkyl, C₁-C₆-heteroalkyl, C₁-C₆-haloalkyl, cycloalkyl, heterocyclyl, aryl, heteroaryl, halo, cyano, oxo, or —OR^{A}; each R^{A} is independently hydrogen, C₁-C₆ alkyl, C₁-C₆ haloalkyl, aryl, heteroaryl, C₁-C₆ alkylene-aryl, C₁-C₆ alkylene-heteroaryl, —C(O)R^{D}, or —S(O)ₓR^{D}; each R^{B} and R^{C} is independently hydrogen, C₁-C₆ alkyl, C₁-C₆ heteroalkyl, cycloalkyl, heterocyclyl, —OR^{A}; or R^{B} and R^{C} together with the atom to which they are attached form a 3-7-membered heterocyclyl ring optionally substituted with one or more R⁹; each R^{D} is independently hydrogen, C₁-C₆ alkyl, C₂-C₆ alkenyl, C₂-C₆ alkynyl, C₁-C₆ heteroalkyl, C₁-C₆ haloalkyl, cycloalkyl, heterocyclyl, aryl, heteroaryl, C₁-C₆ alkylene-aryl, or C₁-C₆ alkylene-heteroaryl; each R⁹ is independently C₁-C₆-alkyl or halo; n is 0, 1, or 2; m is 0, 1, 2, or 3; and x is 0, 1, or 2.

[0331] In some embodiments, A is heterocyclyl optionally substituted with one or more R¹. In some embodiments, A is monocyclic nitrogen-containing heterocyclyl. In some embodiments, A is optionally substituted piperidinyl. In some embodiments, A is selected from

[chemical structure]

wherein R¹ is as defined herein.

[0332] In some embodiments, A is selected from,

[chemical structure]

wherein R¹ is as defined herein.

[0333] In some embodiments, A is selected from

[chemical structure]

[0334] In some embodiments, A is heteroaryl. In some embodiments, A is a nitrogen-containing heteroaryl. In some embodiments, A is a bicyclic nitrogen-containing heteroaryl.

[0335] In some embodiments, A is selected from

[chemical structure]

In some embodiments, A is

[chemical structure]

wherein R¹ is as defined herein. In some embodiments, A is selected from

[chemical structure]

[0336] In some embodiments, A is

[chemical structure]

In some embodiments, A is

[chemical structure]

In some embodiments, A is

[chemical structure]

In some embodiments, A is

[chemical structure]

In some embodiments, A is

[chemical structure]

In some embodiments, A is

[chemical structure]

In some embodiments, A is

[chemical structure]

In some embodiments, A is

[chemical structure]

In some embodiments, A is

[chemical structure]

[0337] In some embodiments, B is heteroaryl. In some embodiments, B is a nitrogen-containing heteroaryl. In some embodiments, B is a bicyclic nitrogen-containing heteroaryl. In some embodiments, B is selected from

[chemical structure]

In some embodiments, B is

[chemical structure]

wherein R¹ is as defined herein.

[0338] In some embodiments, B is selected from

[chemical structure]

[0339] In some embodiments, B is heterocyclyl. In some embodiments, B is a nitrogen-containing heterocyclyl. In some embodiments, B is a monocyclic nitrogen-containing heterocyclyl or a bicyclic nitrogen-containing heterocyclyl. In some embodiments, B is selected from

[chemical structure]

wherein R¹ is as defined herein. In some embodiments, B is selected from

[chemical structure]

wherein R¹ is as defined herein. In some embodiments, B is selected from,

[chemical structure]

wherein R¹ is as defined herein.

[0340] In some embodiments, B is selected from

[chemical structure]

[0341] In some embodiments, B is

[chemical structure]

In some embodiments, B is

[chemical structure]

In some embodiments, B is

[chemical structure]

In some embodiments, B is

[chemical structure]

In some embodiments, B is

[chemical structure]

In some embodiments, B is

[chemical structure]

In some embodiments, B is

[chemical structure]

In some embodiments, B is

[chemical structure]

In some embodiments, B is

[chemical structure]

In some embodiments, B is

[chemical structure]

In some embodiments, B is

[chemical structure]

In some embodiments, B is

[chemical structure]

In some embodiments, B is

[chemical structure]

In some embodiments, B is

[chemical structure]

[0342] In some embodiments, the compound of Formula (V) is Formula (V-b):

[chemical structure]

or a pharmaceutically acceptable salt, solvate, hydrate, tautomer, or stereoisomer thereof, wherein A and B are each independently cycloalkyl, heterocyclyl, aryl, or heteroaryl, each of which is optionally substituted with one or more R¹; L¹ is independently absent, C₁-C₆-alkylene, C₁-C₆-heteroalkylene, —O—, —C(O)—, —N(R⁴)—, —N(R⁴)C(O)—, or —C(O)N(R⁴)—, wherein each alkylene and heteroalkylene is optionally substituted with one or more R⁷; each R¹ is independently hydrogen, C₁-C₆-alkyl, C₂-C₆-alkenyl, C₂-C₆-alkynyl, C₁-C₆-heteroalkyl, C₁-C₆-haloalkyl, cycloalkyl, heterocyclyl, aryl, C₁-C₆ alkylene-aryl, C₁-C₆ alkenylene-aryl, C₁-C₆ alkylene-heteroaryl, heteroaryl, halo, cyano, oxo, —OR^{A}, —NR^{B}R^{C}, —NR^{B}C(O)R^{D}, —NO₂, —C(O)NR^{B}R^{C}, —C(O)R^{D}, —C(O)OR^{D}, or —S(O)ₓR^{D}, wherein each alkyl, alkylene, alkenyl, alkynyl, heteroalkyl, haloalkyl, cycloalkyl, heterocyclyl, aryl, and heteroaryl is optionally substituted with one or more R⁵; or two R¹ groups, together with the atoms to which they are attached, form a 3-7-membered cycloalkyl, heterocyclyl, aryl, or heteroaryl, wherein each cycloalkyl, heterocyclyl, aryl, and heteroaryl is optionally substituted with one or more R⁵; each R² is independently hydrogen or C₁-C₆-alkyl; R³ is C₁-C₆-alkyl, C₂-C₆-alkenyl, C₂-C₆-alkynyl, C₁-C₆-heteroalkyl, C₁-C₆-haloalkyl, halo, cyano, —OR^{A}, —NR^{B}R^{C}, —C(O)R^{D}, or —C(O)OR^{D}; R⁴ is hydrogen, C₁-C₆-alkyl, or C₁-C₆-haloalkyl; each R⁵ is independently C₁-C₆-alkyl, C₂-C₆-alkenyl, C₂-C₆-alkynyl, C₁-C₆-heteroalkyl, C₁-C₆-haloalkyl, cycloalkyl, heterocyclyl, aryl, heteroaryl, halo, oxo, cyano, —OR^{A}, —NR^{B}R^{C}, —NR^{B}C(O)R^{D}, —NO₂, —C(O)NR^{B}R^{C}, —C(O)R^{D}, —C(O)OR^{D}, or —S(O)ₓR^{D}, wherein each alkyl, alkenyl, alkynyl, heteroalkyl, haloalkyl, cycloalkyl, heterocyclyl, aryl, and heteroaryl is optionally substituted with one or more R⁷; each R⁷ is independently C₁-C₆-alkyl, C₁-C₆-heteroalkyl, C₁-C₆-haloalkyl, cycloalkyl, heterocyclyl, aryl, heteroaryl, halo, cyano, oxo, or —OR^{A}; each R^{A} is independently hydrogen, C₁-C₆ alkyl, C₁-C₆ haloalkyl, aryl, heteroaryl, C₁-C₆ alkylene-aryl, C₁-C₆ alkylene-heteroaryl, —C(O)R^{D}, or —S(O)ₓR^{D}; each R^{B} and R^{C} is independently hydrogen, C₁-C₆ alkyl, C₁-C₆ heteroalkyl, cycloalkyl, heterocyclyl, —OR^{A}; or R^{B} and R^{C} together with the atom to which they are attached form a 3-7-membered heterocyclyl ring optionally substituted with one or more R⁹; each R^{D} is independently hydrogen, C₁-C₆ alkyl, C₂-C₆ alkenyl, C₂-C₆ alkynyl, C₁-C₆ heteroalkyl, C₁-C₆ haloalkyl, cycloalkyl, heterocyclyl, aryl, heteroaryl, C₁-C₆ alkylene-aryl, or C₁-C₆ alkylene-heteroaryl; each R⁹ is independently C₁-C₆-alkyl or halo; n is 0, 1, or 2; m is 0, 1, 2, or 3; and x is 0, 1, or 2.

[0343] In some embodiments, A is heterocyclyl optionally substituted with one or more R¹. In some embodiments, A is monocyclic nitrogen-containing heterocyclyl. In some embodiments, A is optionally substituted piperidinyl. In some embodiments, A is selected from

[chemical structure]

wherein R¹ is as defined herein.

[0344] In some embodiments, A is selected from,

[chemical structure]

wherein R¹ is as defined herein.

[0345] In some embodiments, A is selected from

[chemical structure]

[0346] In some embodiments, A is heteroaryl. In some embodiments, A is a nitrogen-containing heteroaryl. In some embodiments, A is a bicyclic nitrogen-containing heteroaryl.

[0347] In some embodiments, A is selected from

[chemical structure]

In some embodiments, A is

[chemical structure]

wherein R¹ is as defined herein. In some embodiments, A is selected from

[chemical structure]

[0348] In some embodiments, A is

[chemical structure]

In some embodiments, A is

[chemical structure]

In some embodiments, A is

[chemical structure]

In some embodiments, A is

[chemical structure]

In some embodiments, A is

[chemical structure]

In some embodiments, A is

[chemical structure]

In some embodiments, A is

[chemical structure]

In some embodiments, A is

[chemical structure]

In some embodiments, A is

[chemical structure]

[0349] In some embodiments, B is heteroaryl. In some embodiments, B is a nitrogen-containing heteroaryl. In some embodiments, B is a bicyclic nitrogen-containing heteroaryl. In some embodiments, B is selected from

[chemical structure]

In some embodiments, B is

[chemical structure]

wherein R¹ is as defined herein.

[0350] In some embodiments, B is selected from

[chemical structure]

[0351] In some embodiments, B is heterocyclyl. In some embodiments, B is a nitrogen-containing heterocyclyl. In some embodiments, B is a monocyclic nitrogen-containing heterocyclyl or a bicyclic nitrogen-containing heterocyclyl. In some embodiments, B is selected from

[chemical structure]

wherein R¹ is as defined herein. In some embodiments, B is selected from

[chemical structure]

wherein R¹ is as defined herein. In some embodiments, B is selected from,

[chemical structure]

wherein R¹ is as defined herein.

[0352] In some embodiments, B is selected from

[chemical structure]

[0353] In some embodiments, B is

[chemical structure]

In some embodiments, B is

[chemical structure]

In some embodiments, B is

[chemical structure]

In some embodiments, B is

[chemical structure]

In some embodiments, B is

[chemical structure]

In some embodiments, B is

[chemical structure]

In some embodiments, B is

[chemical structure]

In some embodiments, B is

[chemical structure]

In some embodiments, B is

[chemical structure]

In some embodiments, B is

[chemical structure]

In some embodiments, B is

[chemical structure]

In some embodiments, B is

[chemical structure]

In some embodiments, B is

[chemical structure]

In some embodiments, B is

[chemical structure]

[0354] In some embodiments, the compound of Formula (V) is Formula (V-c):

[chemical structure]

or a pharmaceutically acceptable salt, solvate, hydrate, tautomer, or stereoisomer thereof, wherein A and B are each independently cycloalkyl, heterocyclyl, aryl, or heteroaryl, each of which is optionally substituted with one or more R¹; L¹ is independently absent, C₁-C₆-alkylene, C₁-C₆-heteroalkylene, —O—, —C(O)—, —N(R⁴)—, —N(R⁴)C(O)—, or —C(O)N(R⁴)—, wherein each alkylene and heteroalkylene is optionally substituted with one or more R⁷; each R¹ is independently hydrogen, C₁-C₆-alkyl, C₂-C₆-alkenyl, C₂-C₆-alkynyl, C₁-C₆-heteroalkyl, C₁-C₆-haloalkyl, cycloalkyl, heterocyclyl, aryl, C₁-C₆ alkylene-aryl, C₁-C₆ alkenylene-aryl, C₁-C₆ alkylene-heteroaryl, heteroaryl, halo, cyano, oxo, —OR^{A}, —NR^{B}R^{C}, —NR^{B}C(O)R^{D}, —NO₂, —C(O)NR^{B}R^{C}, —C(O)R^{D}, —C(O)OR^{D}, or —S(O)ₓR^{D}, wherein each alkyl, alkylene, alkenyl, alkynyl, heteroalkyl, haloalkyl, cycloalkyl, heterocyclyl, aryl, and heteroaryl is optionally substituted with one or more R⁵; or two R¹ groups, together with the atoms to which they are attached, form a 3-7-membered cycloalkyl, heterocyclyl, aryl, or heteroaryl, wherein each cycloalkyl, heterocyclyl, aryl, and heteroaryl is optionally substituted with one or more R⁵; each R² is independently hydrogen or C₁-C₆-alkyl; R³ is C₁-C₆-alkyl, C₂-C₆-alkenyl, C₂-C₆-alkynyl, C₁-C₆-heteroalkyl, C₁-C₆-haloalkyl, halo, cyano, —OR^{A}, —NR^{B}R^{C}, —C(O)R^{D}, or —C(O)OR^{D}; R⁴ is hydrogen, C₁-C₆-alkyl, or C₁-C₆-haloalkyl; each R⁵ is independently C₁-C₆-alkyl, C₂-C₆-alkenyl, C₂-C₆-alkynyl, C₁-C₆-heteroalkyl, C₁-C₆-haloalkyl, cycloalkyl, heterocyclyl, aryl, heteroaryl, halo, oxo, cyano, —OR^{A}, —NR^{B}R^{C}, —NR^{B}C(O)R^{D}, NO₂, —C(O)NR^{B}R^{C}, —C(O)R^{D}, —C(O)OR^{D}, or —S(O)ₓR^{D}, wherein each alkyl, alkenyl, alkynyl, heteroalkyl, haloalkyl, cycloalkyl, heterocyclyl, aryl, and heteroaryl is optionally substituted with one or more R⁷; each R⁷ is independently C₁-C₆-alkyl, C₁-C₆-heteroalkyl, C₁-C₆-haloalkyl, cycloalkyl, heterocyclyl, aryl, heteroaryl, halo, cyano, oxo, or —OR^{A}; each R^{A} is independently hydrogen, C₁-C₆ alkyl, C₁-C₆ haloalkyl, aryl, heteroaryl, C₁-C₆ alkylene-aryl, C₁-C₆ alkylene-heteroaryl, —C(O)R^{D}, or —S(O)ₓR^{D}; each R^{B} and R^{C} is independently hydrogen, C₁-C₆ alkyl, C₁-C₆ heteroalkyl, cycloalkyl, heterocyclyl, —OR^{A}; or R^{B} and R^{C} together with the atom to which they are attached form a 3-7-membered heterocyclyl ring optionally substituted with one or more R⁹; each R^{D} is independently hydrogen, C₁-C₆ alkyl, C₂-C₆ alkenyl, C₂-C₆ alkynyl, C₁-C₆ heteroalkyl, C₁-C₆ haloalkyl, cycloalkyl, heterocyclyl, aryl, heteroaryl, C₁-C₆ alkylene-aryl, or C₁-C₆ alkylene-heteroaryl; each R⁹ is independently C₁-C₆-alkyl or halo; n is 0, 1, or 2; and x is 0, 1, or 2.

[0355] In some embodiments, A is heterocyclyl optionally substituted with one or more R¹. In some embodiments, A is monocyclic nitrogen-containing heterocyclyl. In some embodiments, A is optionally substituted piperidinyl. In some embodiments, A is selected from

[chemical structure]

wherein R¹ is as defined herein.

[0356] In some embodiments, A is selected from,

[chemical structure]

wherein R¹ is as defined herein.

[0357] In some embodiments, A is selected from

[chemical structure]

[0358] In some embodiments, A is heteroaryl. In some embodiments, A is a nitrogen-containing heteroaryl. In some embodiments, A is a bicyclic nitrogen-containing heteroaryl.

[0359] In some embodiments, A is selected from

[chemical structure]

In some embodiments, A is

[chemical structure]

wherein R¹ is as defined herein. In some embodiments, A is selected from

[chemical structure]

[0360] In some embodiments, A is

[chemical structure]

In some embodiments, A is

[chemical structure]

In some embodiments, A is

[chemical structure]

In some embodiments, A is

[chemical structure]

In some embodiments, A is

[chemical structure]

In some embodiments, A is

[chemical structure]

In some embodiments, A is

[chemical structure]

In some embodiments, A is

[chemical structure]

In some embodiments, A is

[chemical structure]

[0361] In some embodiments, B is heteroaryl. In some embodiments, B is a nitrogen-containing heteroaryl. In some embodiments, B is a bicyclic nitrogen-containing heteroaryl. In some embodiments, B is selected from

[chemical structure]

In some embodiments, B is

[chemical structure]

wherein R¹ is as defined herein.

[0362] In some embodiments, B is selected from

[chemical structure]

[0363] In some embodiments, B is heterocyclyl. In some embodiments, B is a nitrogen-containing heterocyclyl. In some embodiments, B is a monocyclic nitrogen-containing heterocyclyl or a bicyclic nitrogen-containing heterocyclyl. In some embodiments, B is selected from

[chemical structure]

wherein R¹ is as defined herein. In some embodiments, B is selected from

[chemical structure]

wherein R¹ is as defined herein. In some embodiments, B is selected from,

[chemical structure]

wherein R¹ is as defined herein.

[0364] In some embodiments, B is selected from

[chemical structure]

[0365] In some embodiments, B is

[chemical structure]

In some embodiments, B is

[chemical structure]

In some embodiments, B is

[chemical structure]

In some embodiments, B is

[chemical structure]

In some embodiments, B is

[chemical structure]

In some embodiments, B is

[chemical structure]

In some embodiments, B is

[chemical structure]

In some embodiments, B is

[chemical structure]

In some embodiments, B is

[chemical structure]

In some embodiments, B is

[chemical structure]

In some embodiments, B is

[chemical structure]

In some embodiments, B is

[chemical structure]

In some embodiments, B is

[chemical structure]

In some embodiments, B is

[chemical structure]

[0366] In some embodiments, the compound of Formula (V) is Formula (V-d):

[chemical structure]

or a pharmaceutically acceptable salt, solvate, hydrate, tautomer, or stereoisomer thereof, wherein A is cycloalkyl, heterocyclyl, aryl, or heteroaryl, each of which is optionally substituted with one or more R¹; R^{B1} is C₁-C₆-alkyl or C₁-C₆-heteroalkyl, each of which is optionally substituted with R¹⁰; L¹ is independently absent, C₁-C₆-alkylene, C₁-C₆-heteroalkylene, —O—, —C(O)—, —N(R⁴)—, —N(R⁴)C(O)—, or —C(O)N(R⁴)—, wherein each alkylene and heteroalkylene is optionally substituted with one or more R⁷; each R¹ is independently hydrogen, C₁-C₆-alkyl, C₂-C₆-alkenyl, C₂-C₆-alkynyl, C₁-C₆-heteroalkyl, C₁-C₆-haloalkyl, cycloalkyl, heterocyclyl, aryl, C₁-C₆ alkylene-aryl, C₁-C₆ alkenylene-aryl, C₁-C₆ alkylene-heteroaryl, heteroaryl, halo, cyano, oxo, —OR^{A}, —NR^{B}R^{C}, NR^{B}C(O)R^{D}, —NO₂, —C(O)NR^{B}R^{C}, —C(O)R^{D}, —C(O)OR^{D}, or —S(O)ₓR^{D}, wherein each alkyl, alkylene, alkenyl, alkynyl, heteroalkyl, haloalkyl, cycloalkyl, heterocyclyl, aryl, and heteroaryl is optionally substituted with one or more R⁵; or two R¹ groups, together with the atoms to which they are attached, form a 3-7-membered cycloalkyl, heterocyclyl, aryl, or heteroaryl, wherein each cycloalkyl, heterocyclyl, aryl, and heteroaryl is optionally substituted with one or more R⁵; each R² is independently hydrogen or C₁-C₆-alkyl; R³ is C₁-C₆-alkyl, C₂-C₆-alkenyl, C₂-C₆-alkynyl, C₁-C₆-heteroalkyl, C₁-C₆-haloalkyl, halo, cyano, —OR^{A}, —NR^{B}R^{C}, —C(O)R^{D}, or —C(O)OR^{D}; R⁴ is hydrogen, C₁-C₆-alkyl, or C₁-C₆-haloalkyl; each R⁵ is independently C₁-C₆-alkyl, C₂-C₆-alkenyl, C₂-C₆-alkynyl, C₁-C₆-heteroalkyl, C₁-C₆-haloalkyl, cycloalkyl, heterocyclyl, aryl, heteroaryl, halo, oxo, cyano, —OR^{A}, —NR^{B}R^{C}, —NR^{B}C(O)R^{D}, —NO₂, —C(O)NR^{B}R^{C}, —C(O)R^{D}, C(O)OR^{D}, or —S(O)ₓR^{D}, wherein each alkyl, alkenyl, alkynyl, heteroalkyl, haloalkyl, cycloalkyl, heterocyclyl, aryl, and heteroaryl is optionally substituted with one or more R⁷; each R⁷ is independently C₁-C₆-alkyl, C₁-C₆-heteroalkyl, C₁-C₆-haloalkyl, cycloalkyl, heterocyclyl, aryl, heteroaryl, halo, cyano, oxo, or —OR^{A}; each R^{A} is independently hydrogen, C₁-C₆ alkyl, C₁-C₆ haloalkyl, aryl, heteroaryl, C₁-C₆ alkylene-aryl, C₁-C₆ alkylene-heteroaryl, —C(O)R^{D}, or —S(O)ₓR^{D}; each R^{B} and R^{C} is independently hydrogen, C₁-C₆ alkyl, C₁-C₆ heteroalkyl, cycloalkyl, heterocyclyl, —OR^{A}; or R^{B} and R^{C} together with the atom to which they are attached form a 3-7-membered heterocyclyl ring optionally substituted with one or more R⁹; each R^{D} is independently hydrogen, C₁-C₆ alkyl, C₂-C₆ alkenyl, C₂-C₆ alkynyl, C₁-C₆ heteroalkyl, C₁-C₆ haloalkyl, cycloalkyl, heterocyclyl, aryl, heteroaryl, C₁-C₆ alkylene-aryl, or C₁-C₆ alkylene-heteroaryl; each R⁹ and R¹⁰ is independently C₁-C₆-alkyl or halo; n is 0, 1, or 2; and x is 0, 1, or 2.

[0367] In some embodiments, A is heterocyclyl optionally substituted with one or more R¹. In some embodiments, A is monocyclic nitrogen-containing heterocyclyl. In some embodiments, A is optionally substituted piperidinyl. In some embodiments, A is selected from

[chemical structure]

wherein R¹ is as defined herein.

[0368] In some embodiments, A is selected from,

[chemical structure]

wherein R¹ is as defined herein.

[0369] In some embodiments, A is selected from

[chemical structure]

[0370] In some embodiments, A is heteroaryl. In some embodiments, A is a nitrogen-containing heteroaryl. In some embodiments, A is a bicyclic nitrogen-containing heteroaryl.

[0371] In some embodiments, A is selected from

[chemical structure]

In some embodiments, A is

[chemical structure]

wherein R¹ is as defined herein. In some embodiments, A is selected from

[chemical structure]

[0372] In some embodiments, A is

[chemical structure]

In some embodiments, A is

[chemical structure]

In some embodiments, A is

[chemical structure]

In some embodiments, A is

[chemical structure]

In some embodiments, A is

[chemical structure]

In some embodiments, A is

[chemical structure]

In some embodiments, A is

[chemical structure]

In some embodiments, A is

[chemical structure]

In some embodiments, A is

[chemical structure]

[0373] In some embodiments, B is heteroaryl. In some embodiments, B is a nitrogen-containing heteroaryl. In some embodiments, B is a bicyclic nitrogen-containing heteroaryl. In some embodiments, B is selected from

[chemical structure]

In some embodiments, B is

[chemical structure]

wherein R¹ is as defined herein.

[0374] In some embodiments, B is selected from

[chemical structure]

[0375] In some embodiments, B is heterocyclyl. In some embodiments, B is a nitrogen-containing heterocyclyl. In some embodiments, B is a monocyclic nitrogen-containing heterocyclyl or a bicyclic nitrogen-containing heterocyclyl. In some embodiments, B is selected from

[chemical structure]

wherein R¹ is as defined herein. In some embodiments, B is selected from

[chemical structure]

wherein R¹ is as defined herein. In some embodiments, B is selected from,

[chemical structure]

wherein R¹ is as defined herein.

[0376] In some embodiments, B is selected from

[chemical structure]

[0377] In some embodiments, B is

[chemical structure]

In some embodiments, B is

[chemical structure]

In some embodiments, B is

[chemical structure]

In some embodiments, B is

[chemical structure]

In some embodiments, B is

[chemical structure]

In some embodiments, B is

[chemical structure]

[0378] In some embodiments, B is

[chemical structure]

In some embodiments, B is

[chemical structure]

In some embodiments, B is

[chemical structure]

In some embodiments, B is

[chemical structure]

In some embodiments, B is

[chemical structure]

In some embodiments, B is

[chemical structure]

In some embodiments, B is

[chemical structure]

In some embodiments, B is

[chemical structure]

[0379] In some embodiments, the compound of Formula (V) is selected from a compound in Table 5, or a pharmaceutically acceptable salt, solvate, hydrate, tautomer, or stereoisomer thereof.

TABLE 5
Exemplary compounds of Formula (V)

| Compound | |
|---|---|
| No. | Structure |
| 185 | [chemical structure] |
| 186 | [chemical structure] |
| 187 | [chemical structure] |
| 188 | [chemical structure] |
| 215 | [chemical structure] |
| 216 | [chemical structure] |
| 217 | [chemical structure] |
| 218 | [chemical structure] |
| 219 | [chemical structure] |
| 220 | [chemical structure] |
| 221 | [chemical structure] |
| 222 | [chemical structure] |
| 223 | [chemical structure] |
| 224 | [chemical structure] |
| 225 | [chemical structure] |
| 226 | [chemical structure] |
| 247 | [chemical structure] |
| 248 | [chemical structure] |
| 249 | [chemical structure] |
| 250 | [chemical structure] |
| 251 | [chemical structure] |
| 252 | [chemical structure] |
| 253 | [chemical structure] |
| 254 | [chemical structure] |
| 255 | [chemical structure] |
| 256 | [chemical structure] |
| 257 | [chemical structure] |
| 258 | [chemical structure] |
| 259 | [chemical structure] |
| 260 | [chemical structure] |
| 261 | [chemical structure] |
| 262 | [chemical structure] |
| 263 | [chemical structure] |
| 264 | [chemical structure] |
| 265 | [chemical structure] |
| 266 | [chemical structure] |
| 267 | [chemical structure] |
| 268 | [chemical structure] |
| 269 | [chemical structure] |
| 270 | [chemical structure] |
| 271 | [chemical structure] |
| 272 | [chemical structure] |
| 273 | [chemical structure] |
| 274 | [chemical structure] |
| 275 | [chemical structure] |
| 276 | [chemical structure] |
| 277 | [chemical structure] |
| 278 | [chemical structure] |
| 279 | [chemical structure] |
| 280 | [chemical structure] |
| 281 | [chemical structure] |
| 282 | [chemical structure] |
| 283 | [chemical structure] |
| 304 | [chemical structure] |
| 305 | [chemical structure] |
| 309 | [chemical structure] |
| 310 | [chemical structure] |
| 312 | [chemical structure] |
| 313 | [chemical structure] |
| 314 | [chemical structure] |
| 322 | [chemical structure] |
| 324 | [chemical structure] |
| 325 | [chemical structure] |
| 326 | [chemical structure] |
| 327 | [chemical structure] |
| 328 | [chemical structure] |
| 329 | [chemical structure] |
| 330 | [chemical structure] |
| 331 | [chemical structure] |
| 332 | [chemical structure] |
| 333 | [chemical structure] |
| 334 | [chemical structure] |
| 335 | [chemical structure] |
| 336 | [chemical structure] |

[0380] In some embodiments, for Formula (V), A is bicyclic heterocyclyl (e.g., 2,8-dimethylimidazo[1,2-b]pyridazyl); B is monocyclic heterocyclyl (e.g., piperidinyl); L¹ and L² are absent; Y is C(R^{6a})(R^{6b}) (e.g., CH₂); each R² is hydrogen; m is 0; and n is 2. In some embodiments, the compound of Formula (V) is Compound 185, or a pharmaceutically acceptable salt, solvate, hydrate, tautomer, or stereoisomer thereof.

[0381] In some embodiments, for Formula (V), A is bicyclic heterocyclyl (e.g., 2,8-dimethylimidazo[1,2-b]pyridazyl); B is monocyclic heterocyclyl (e.g., piperidinyl); L¹ and L² are absent; Y is N; R² is hydrogen; m is 0; and n is 1. In some embodiments, the compound of Formula (V) is Compound 186, or a pharmaceutically acceptable salt, solvate, hydrate, tautomer, or stereoisomer thereof.

[0382] In some embodiments, for Formula (V), A is bicyclic heterocyclyl (e.g., 2,8-dimethylimidazo[1,2-b]pyridazyl); B is monocyclic heterocyclyl (e.g., piperidinyl); L¹ and L² are absent; Y is C(R^{6a})(R^{6b}) (e.g., CH₂); each R² is hydrogen; R³ is halo (e.g., F); m is 1; and n is 2. In some embodiments, the compound of Formula (V) is Compound 187, 188, or a pharmaceutically acceptable salt, solvate, hydrate, tautomer, or stereoisomer thereof.

[0383] In some embodiments, for Formula (V), A is bicyclic heterocyclyl (e.g., 4-fluoro-2-methylbenzo[d]oxazolyl); B is monocyclic heterocyclyl (e.g., piperidinyl); L¹ and L² are absent; Y is C(R^{6a})(R^{6b}) (e.g., CH₂); each R² is hydrogen; m is 0; and n is 2. In some embodiments, the compound of Formula (V) is Compound 215, or a pharmaceutically acceptable salt, solvate, hydrate, tautomer, or stereoisomer thereof.

[0384] In some embodiments, for Formula (V), A is bicyclic heterocyclyl (e.g., 8-chloro-2-methylimidazo[1,2-a]pyridinyl); B is monocyclic heterocyclyl (e.g., piperidinyl); L¹ and L² are absent; Y is C(R^{6a})(R^{6b}) (e.g., CH₂); each R² is hydrogen; m is 0; and n is 2. In some embodiments, the compound of Formula (V) is Compound 216, or a pharmaceutically acceptable salt, solvate, hydrate, tautomer, or stereoisomer thereof.

[0385] In some embodiments, for Formula (V), A is bicyclic heterocyclyl (e.g., 2,8-dimethylimidazo[1,2-a]pyridinyl); B is monocyclic heterocyclyl (e.g., piperidinyl); L¹ and L² are absent; Y is C(R^{6a})(R^{6b}) (e.g., CH₂); each R² is hydrogen; m is 0; and n is 2. In some embodiments, the compound of Formula (V) is Compound 217, or a pharmaceutically acceptable salt, solvate, hydrate, tautomer, or stereoisomer thereof.

[0386] In some embodiments, for Formula (V), A is bicyclic heterocyclyl (e.g., 2,7-dimethylimidazo[1,2-a]pyridinyl); B is monocyclic heterocyclyl (e.g., piperidinyl); L¹ and L² are absent; Y is C(R^{6a})(R^{6b}) (e.g., CH₂); each R² is hydrogen; m is 0; and n is 2. In some embodiments, the compound of Formula (V) is Compound 218, or a pharmaceutically acceptable salt, solvate, hydrate, tautomer, or stereoisomer thereof.

[0387] In some embodiments, for Formula (V), A is bicyclic heterocyclyl (e.g., 2,7-dimethyl-2H-indazolyl); B is monocyclic heterocyclyl (e.g., piperidinyl); L¹ and L² are absent; Y is C(R^{6a})(R^{6b}) (e.g., CH₂); each R² is hydrogen; m is 0; and n is 2. In some embodiments, the compound of Formula (V) is Compound 219, or a pharmaceutically acceptable salt, solvate, hydrate, tautomer, or stereoisomer thereof.

[0388] In some embodiments, for Formula (V), A is monocyclic heterocyclyl (e.g., pyrazolyl); B is monocyclic heterocyclyl (e.g., piperidinyl); L¹ and L² are absent; Y is C(R^{6a})(R^{6b}) (e.g., CH₂); each R² is hydrogen; m is 0; and n is 2. In some embodiments, the compound of Formula (V) is Compound 220, or a pharmaceutically acceptable salt, solvate, hydrate, tautomer, or stereoisomer thereof.

[0389] In some embodiments, for Formula (V), A is bicyclic heterocyclyl (e.g., 6,8-dimethylimidazo[1,2-a]pyrazyl); B is monocyclic heterocyclyl (e.g., piperidinyl); L¹ and L² are absent; Y is C(R^{6a})(R^{6b}) (e.g., CH₂); each R² is hydrogen; m is 0; and n is 2. In some embodiments, the compound of Formula (V) is Compound 221, or a pharmaceutically acceptable salt, solvate, hydrate, tautomer, or stereoisomer thereof.

[0390] In some embodiments, for Formula (V), A is bicyclic heterocyclyl (e.g., 6,8-dimethyl-[1,2,4]triazolo[1,5-a]pyrazyl); B is monocyclic heterocyclyl (e.g., piperidinyl); L¹ and L² are absent; Y is C(R^{6a})(R^{6b}) (e.g., CH₂); each R² is hydrogen; m is 0; and n is 2. In some embodiments, the compound of Formula (V) is Compound 222, or a pharmaceutically acceptable salt, solvate, hydrate, tautomer, or stereoisomer thereof.

[0391] In some embodiments, for Formula (V), A is bicyclic heterocyclyl (e.g., 4,6-dimethylpyrazolo[1,5-a]pyrazyl); B is monocyclic heterocyclyl (e.g., piperidinyl); L¹ and L² are absent; Y is C(R^{6a})(R^{6b}) (e.g., CH₂); each R² is hydrogen; m is 0; and n is 2. In some embodiments, the compound of Formula (V) is Compound 223, or a pharmaceutically acceptable salt, solvate, hydrate, tautomer, or stereoisomer thereof.

[0392] In some embodiments, for Formula (V), A is bicyclic heterocyclyl (e.g., 2-methylimidazo[1,2-a]pyrazyl); B is monocyclic heterocyclyl (e.g., piperidinyl); L¹ and L² are absent; Y is C(R^{6a})(R^{6b}) (e.g., CH₂); each R² is hydrogen; m is 0; and n is 2. In some embodiments, the compound of Formula (V) is Compound 224, or a pharmaceutically acceptable salt, solvate, hydrate, tautomer, or stereoisomer thereof.

[0393] In some embodiments, for Formula (V), A is bicyclic heterocyclyl (e.g., 7-fluoro-2-methyl-2H-indazolyl); B is monocyclic heterocyclyl (e.g., piperidinyl); L¹ and L² are absent; Y is C(R^{6a})(R^{6b}) (e.g., CH₂); each R² is hydrogen; m is 0; and n is 2. In some embodiments, the compound of Formula (V) is Compound 225, or a pharmaceutically acceptable salt, solvate, hydrate, tautomer, or stereoisomer thereof.

[0394] In some embodiments, for Formula (V), A is bicyclic heterocyclyl (e.g., 4-fluoro-2-methylbenzo[d]thiazolyl); B is monocyclic heterocyclyl (e.g., piperidinyl); L¹ and L² are absent; Y is C(R^{6a})(R^{6b}) (e.g., CH₂); each R² is hydrogen; m is 0; and n is 2. In some embodiments, the compound of Formula (V) is Compound 226, or a pharmaceutically acceptable salt, solvate, hydrate, tautomer, or stereoisomer thereof.

[0395] In some embodiments, for Formula (V), A is bicyclic heterocyclyl (e.g., 8-fluoro-2-methylimidazo[1,2-a]pyridinyl); B is monocyclic heterocyclyl (e.g., piperidinyl); L¹ and L² are absent; Y is C(R^{6a})(R^{6b}) (e.g., CH₂); each R² is hydrogen; m is 0; and n is 2. In some embodiments, the compound of Formula (V) is Compound 247, or a pharmaceutically acceptable salt, solvate, hydrate, tautomer, or stereoisomer thereof.

[0396] In some embodiments, for Formula (V), A is bicyclic heterocyclyl (e.g., 8-fluoro-2-methylimidazo[1,2-a]pyridinyl); B is monocyclic heterocyclyl (e.g., piperidinyl); L¹ and L² are absent; Y is N; R² is hydrogen; m is 0; and n is 1. In some embodiments, the compound of Formula (V) is Compound 248, or a pharmaceutically acceptable salt, solvate, hydrate, tautomer, or stereoisomer thereof.

[0397] In some embodiments, for Formula (V), A is bicyclic heterocyclyl (e.g., 7-fluoro-2-methyl-2H-indazolyl); B is monocyclic heterocyclyl (e.g., piperidinyl); L¹ and L² are absent; Y is N; R² is hydrogen; m is 0; and n is 1. In some embodiments, the compound of Formula (V) is Compound 249, or a pharmaceutically acceptable salt, solvate, hydrate, tautomer, or stereoisomer thereof.

[0398] In some embodiments, for Formula (V), A is bicyclic heterocyclyl (e.g., 4-fluoro-2-methylbenzo[d]oxazolyl); B is monocyclic heterocyclyl (e.g., piperidinyl); L¹ and L² are absent; Y is N; R² is hydrogen; m is 0; and n is 1. In some embodiments, the compound of Formula (V) is Compound 250, or a pharmaceutically acceptable salt, solvate, hydrate, tautomer, or stereoisomer thereof.

[0399] In some embodiments, for Formula (V), A is bicyclic heterocyclyl (e.g., 2,7-dimethyl-2H-indazolyl); B is monocyclic heterocyclyl (e.g., piperidinyl); L¹ and L² are absent; Y is N; R² is hydrogen; m is 0; and n is 1. In some embodiments, the compound of Formula (V) is Compound 251, or a pharmaceutically acceptable salt, solvate, hydrate, tautomer, or stereoisomer thereof.

[0400] In some embodiments, for Formula (V), A is bicyclic heterocyclyl (e.g., 2-methyl-8-(trifluoromethyl)imidazo[1,2-a]pyridinyl); B is monocyclic heterocyclyl (e.g., piperidinyl); L¹ and L² are absent; Y is N; R² is hydrogen; m is 0; and n is 1. In some embodiments, the compound of Formula (V) is Compound 252, or a pharmaceutically acceptable salt, solvate, hydrate, tautomer, or stereoisomer thereof.

[0401] In some embodiments, for Formula (V), A is bicyclic heterocyclyl (e.g., 4-fluoro-2-methylbenzo[d]thiazolyl); B is monocyclic heterocyclyl (e.g., piperidinyl); L¹ and L² are absent; Y is N; R² is hydrogen; m is 0; and n is 1. In some embodiments, the compound of Formula (V) is Compound 253, or a pharmaceutically acceptable salt, solvate, hydrate, tautomer, or stereoisomer thereof.

[0402] In some embodiments, for Formula (V), A is bicyclic heterocyclyl (e.g., 2,7-dimethylimidazo[1,2-a]pyridinyl); B is monocyclic heterocyclyl (e.g., piperidinyl); L¹ and L² are absent; Y is N; R² is hydrogen; m is 0; and n is 1. In some embodiments, the compound of Formula (V) is Compound 254, or a pharmaceutically acceptable salt, solvate, hydrate, tautomer, or stereoisomer thereof.

[0403] In some embodiments, for Formula (V), A is bicyclic heterocyclyl (e.g., 2-methylimidazo[1,2-a]pyrazyl); B is monocyclic heterocyclyl (e.g., piperidinyl); L¹ and L² are absent; Y is N; R² is hydrogen; m is 0; and n is 1. In some embodiments, the compound of Formula (V) is Compound 255, or a pharmaceutically acceptable salt, solvate, hydrate, tautomer, or stereoisomer thereof.

[0404] In some embodiments, for Formula (V), A is bicyclic heterocyclyl (e.g., 8-chloro-2-methylimidazo[1,2-a]pyridinyl); B is monocyclic heterocyclyl (e.g., piperidinyl); L¹ and L² are absent; Y is N; R² is hydrogen; m is 0; and n is 1. In some embodiments, the compound of Formula (V) is Compound 256, or a pharmaceutically acceptable salt, solvate, hydrate, tautomer, or stereoisomer thereof.

[0405] In some embodiments, for Formula (V), A is bicyclic heterocyclyl (e.g., 2,8-dimethylimidazo[1,2-a]pyridinyl); B is monocyclic heterocyclyl (e.g., piperidinyl); L¹ and L² are absent; Y is N; R² is hydrogen; m is 0; and n is 1. In some embodiments, the compound of Formula (V) is Compound 257, or a pharmaceutically acceptable salt, solvate, hydrate, tautomer, or stereoisomer thereof.

[0406] In some embodiments, for Formula (V), A is bicyclic heterocyclyl (e.g., 6,8-dimethylimidazo[1,2-a]pyrazyl); B is monocyclic heterocyclyl (e.g., piperidinyl); L¹ and L² are absent; Y is N; R² is hydrogen; m is 0; and n is 1. In some embodiments, the compound of Formula (V) is Compound 258, or a pharmaceutically acceptable salt, solvate, hydrate, tautomer, or stereoisomer thereof.

[0407] In some embodiments, for Formula (V), A is bicyclic heterocyclyl (e.g., 6,8-dimethyl-[1,2,4]triazolo[1,5-a]pyrazyl); B is monocyclic heterocyclyl (e.g., piperidinyl); L¹ and L² are absent; Y is N; R² is hydrogen; m is 0; and n is 1. In some embodiments, the compound of Formula (V) is Compound 259, or a pharmaceutically acceptable salt, solvate, hydrate, tautomer, or stereoisomer thereof.

[0408] In some embodiments, for Formula (V), A is bicyclic heterocyclyl (e.g., 4,6-dimethylpyrazolo[1,5-a]pyrazyl); B is monocyclic heterocyclyl (e.g., piperidinyl); L¹ and L² are absent; Y is N; R² is hydrogen; m is 0; and n is 1. In some embodiments, the compound of Formula (V) is Compound 260, or a pharmaceutically acceptable salt, solvate, hydrate, tautomer, or stereoisomer thereof.

[0409] In some embodiments, for Formula (V), A is monocyclic heterocyclyl (e.g., pyrazyl); B is monocyclic heterocyclyl (e.g., piperidinyl); L¹ and L² are absent; Y is N; R² is hydrogen; m is 0; and n is 1. In some embodiments, the compound of Formula (V) is Compound 261, or a pharmaceutically acceptable salt, solvate, hydrate, tautomer, or stereoisomer thereof.

[0410] In some embodiments, for Formula (V), A is bicyclic heterocyclyl (e.g., 2-methyl-8-(trifluoromethyl)imidazo[1,2-a]pyridinyl); B is monocyclic heterocyclyl (e.g., piperidinyl); L¹ and L² are absent; Y is N; R² is hydrogen; m is 0; and n is 1. In some embodiments, the compound of Formula (V) is Compound 262, or a pharmaceutically acceptable salt, solvate, hydrate, tautomer, or stereoisomer thereof.

[0411] In some embodiments, for Formula (V), A is bicyclic heterocyclyl (e.g., 2-methyl-2H-indazolyl); B is monocyclic heterocyclyl (e.g., piperidinyl); L¹ and L² are absent; Y is N; R² is hydrogen; m is 0; and n is 1. In some embodiments, the compound of Formula (V) is Compound 263, or a pharmaceutically acceptable salt, solvate, hydrate, tautomer, or stereoisomer thereof.

[0412] In some embodiments, for Formula (V), A is bicyclic heterocyclyl (e.g., 2,8-dimethylimidazo[1,2-b]pyridazyl); B is monocyclic heterocyclyl (e.g., pyrrolidinyl); L¹ and L² are absent; Y is N; R² is hydrogen; m is 0; and n is 1. In some embodiments, the compound of Formula (V) is Compound 264, or a pharmaceutically acceptable salt, solvate, hydrate, tautomer, or stereoisomer thereof.

[0413] In some embodiments, for Formula (V), A is bicyclic heterocyclyl (e.g., 2,8-dimethylimidazo[1,2-b]pyridazyl); B is monocyclic heterocyclyl (e.g., N-methyl piperidinyl); L¹ and L² are absent; Y is N; R² is hydrogen; m is 0; and n is 1. In some embodiments, the compound of Formula (V) is Compound 265, or a pharmaceutically acceptable salt, solvate, hydrate, tautomer, or stereoisomer thereof.

[0414] In some embodiments, for Formula (V), A is bicyclic heterocyclyl (e.g., 2,8-dimethylimidazo[1,2-b]pyridazyl); B is monocyclic heterocyclyl (e.g., N-ethyl piperidinyl); L¹ and L² are absent; Y is N; R² is hydrogen; m is 0; and n is 1. In some embodiments, the compound of Formula (V) is Compound 266, or a pharmaceutically acceptable salt, solvate, hydrate, tautomer, or stereoisomer thereof.

[0415] In some embodiments, for Formula (V), A is bicyclic heterocyclyl (e.g., 2,8-dimethylimidazo[1,2-b]pyridazyl); B is monocyclic heterocyclyl (e.g., 2,2-dimethylpiperidinyl); L¹ and L² are absent; Y is C(R^{6a})(R^{6b}) (e.g., CH₂); each R² is hydrogen; m is 0; and n is 2. In some embodiments, the compound of Formula (V) is Compound 267, or a pharmaceutically acceptable salt, solvate, hydrate, tautomer, or stereoisomer thereof.

[0416] In some embodiments, for Formula (V), A is bicyclic heterocyclyl (e.g., 2,8-dimethylimidazo[1,2-b]pyridazyl); B is monocyclic heterocyclyl (e.g., N-methyl piperidinyl); L¹ and L² are absent; Y is C(R^{6a})(R^{6b}) (e.g., CH₂); each R² is hydrogen; m is 0; and n is 2. In some embodiments, the compound of Formula (V) is Compound 268, or a pharmaceutically acceptable salt, solvate, hydrate, tautomer, or stereoisomer thereof.

[0417] In some embodiments, for Formula (V), A is bicyclic heterocyclyl (e.g., 2,8-dimethylimidazo[1,2-b]pyridazyl); B is monocyclic heterocyclyl (e.g., pyrrolidinyl); L¹ and L² are absent; Y is C(R^{6a})(R^{6b}) (e.g., CH₂); each R² is hydrogen; m is 0; and n is 2. In some embodiments, the compound of Formula (V) is Compound 269, or a pharmaceutically acceptable salt, solvate, hydrate, tautomer, or stereoisomer thereof.

[0418] In some embodiments, for Formula (V), A is bicyclic heterocyclyl (e.g., 2,8-dimethylimidazo[1,2-b]pyridazyl); B is monocyclic heterocyclyl (e.g., N-ethyl piperidinyl); L¹ and L² are absent; Y is C(R^{6a})(R^{6b}) (e.g., CH₂); each R² is hydrogen; m is 0; and n is 2. In some embodiments, the compound of Formula (V) is Compound 270, or a pharmaceutically acceptable salt, solvate, hydrate, tautomer, or stereoisomer thereof.

[0419] In some embodiments, for Formula (V), A is bicyclic heterocyclyl (e.g., 2,8-dimethylimidazo[1,2-b]pyridazyl); B is monocyclic heterocyclyl (e.g., N-methyl pyrrolidinyl); L¹ and L² are absent; Y is N; R² is hydrogen; m is 0; and n is 1. In some embodiments, the compound of Formula (V) is Compound 271, or a pharmaceutically acceptable salt, solvate, hydrate, tautomer, or stereoisomer thereof.

[0420] In some embodiments, for Formula (V), A is bicyclic heterocyclyl (e.g., 2,8-dimethylimidazo[1,2-b]pyridazyl); B is monocyclic heterocyclyl (e.g., 2-methylpiperidine); L¹ and L² are absent; Y is N; R² is hydrogen; m is 0; and n is 1. In some embodiments, the compound of Formula (V) is Compound 272, 273, 324, 328, 329, or a pharmaceutically acceptable salt, solvate, hydrate, tautomer, or stereoisomer thereof.

[0421] In some embodiments, for Formula (V), A is bicyclic heterocyclyl (e.g., 2,8-dimethylimidazo[1,2-b]pyridazyl); B is monocyclic heterocyclyl (e.g., 4-azaspiro[2.5]octanyl); L¹ and L² are absent; Y is N; R² is hydrogen; m is 0; and n is 1. In some embodiments, the compound of Formula (V) is Compound 274, or a pharmaceutically acceptable salt, solvate, hydrate, tautomer, or stereoisomer thereof.

[0422] In some embodiments, for Formula (V), A is bicyclic heterocyclyl (e.g., 2,8-dimethylimidazo[1,2-b]pyridazyl); B is monocyclic heterocyclyl (e.g., tetrahydro-2H-pyranyl); L¹ and L² are absent; Y is N; R² is hydrogen; m is 0; and n is 1. In some embodiments, the compound of Formula (V) is Compound 275, or a pharmaceutically acceptable salt, solvate, hydrate, tautomer, or stereoisomer thereof.

[0423] In some embodiments, for Formula (V), A is bicyclic heterocyclyl (e.g., 8-fluoro-2-methylimidazo[1,2-a]pyridinyl); B is monocyclic heterocyclyl (e.g., piperidinyl); L¹ and L² are absent; Y is C(R⁶a) (e.g., CH); R² is hydrogen; m is 0; and n is 1. In some embodiments, the compound of Formula (V) is Compound 276, or a pharmaceutically acceptable salt, solvate, hydrate, tautomer, or stereoisomer thereof.

[0424] In some embodiments, for Formula (V), A is bicyclic heterocyclyl (e.g., 2,8-dimethylimidazo[1,2-b]pyridazyl); B is monocyclic heterocyclyl (e.g., N-methyl 2-methylpiperidine); L¹ and L² are absent; Y is N; R² is hydrogen; m is 0; and n is 1. In some embodiments, the compound of Formula (V) is Compound 277, 278, 325, 330, 331, or a pharmaceutically acceptable salt, solvate, hydrate, tautomer, or stereoisomer thereof.

[0425] In some embodiments, for Formula (V), A is bicyclic heterocyclyl (e.g., 2,8-dimethylimidazo[1,2-b]pyridazyl); B is monocyclic heterocyclyl (e.g., 2,2-dimethylpiperidinyl); L¹ and L² are absent; Y is N; R² is hydrogen; m is 0; and n is 1. In some embodiments, the compound of Formula (V) is Compound 279, or a pharmaceutically acceptable salt, solvate, hydrate, tautomer, or stereoisomer thereof.

[0426] In some embodiments, for Formula (V), A is bicyclic heterocyclyl (e.g., 2,8-dimethylimidazo[1,2-b]pyridazyl); B is monocyclic heterocyclyl (e.g., 8-azabicyclo[3.2.1]octanyl); L¹ and L² are absent; Y is N; R² is hydrogen; m is 0; and n is 1. In some embodiments, the compound of Formula (V) is Compound 280, 326, 332, 333, 334 or a pharmaceutically acceptable salt, solvate, hydrate, tautomer, or stereoisomer thereof.

[0427] In some embodiments, for Formula (V), A is bicyclic heterocyclyl (e.g., 2,8-dimethylimidazo[1,2-b]pyridazyl); B is monocyclic heterocyclyl (e.g., 2-methylpiperidinyl); L¹ and L² are absent; Y is C(R^{6a})(R^{6b}) (e.g., CH₂); each R² is hydrogen; m is 0; and n is 2. In some embodiments, the compound of Formula (V) is Compound 281, 327, or a pharmaceutically acceptable salt, solvate, hydrate, tautomer, or stereoisomer thereof.

[0428] In some embodiments, for Formula (V), A is bicyclic heterocyclyl (e.g., 2,8-dimethylimidazo[1,2-b]pyridazyl); B is monocyclic heterocyclyl (e.g., N-methyl pyrrolidinyl); L¹ and L² are absent; Y is C(R^{6a})(R^{6b}) (e.g., CH₂); each R² is hydrogen; m is 0; and n is 2. In some embodiments, the compound of Formula (V) is Compound 282, or a pharmaceutically acceptable salt, solvate, hydrate, tautomer, or stereoisomer thereof.

[0429] In some embodiments, for Formula (V), A is bicyclic heterocyclyl (e.g., 2,8-dimethylimidazo[1,2-b]pyridazyl); B is monocyclic heterocyclyl (e.g., azepanyl); L¹ and L² are absent; Y is N; R² is hydrogen; m is 0; and n is 1. In some embodiments, the compound of Formula (V) is Compound 283, or a pharmaceutically acceptable salt, solvate, hydrate, tautomer, or stereoisomer thereof.

[0430] In some embodiments, for Formula (V), A is bicyclic heterocyclyl (e.g., 2,8-dimethylimidazo[1,2-b]pyridazyl); B is monocyclic heterocyclyl (e.g., 2-ethylpiperidinyl); L¹ and L² are absent; Y is N; R² is hydrogen; m is 0; and n is 1. In some embodiments, the compound of Formula (V) is Compound 304, 305, 328, 335, 336, or a pharmaceutically acceptable salt, solvate, hydrate, tautomer, or stereoisomer thereof.

[0431] In some embodiments, for Formula (V), A is bicyclic heterocyclyl (e.g., 2,8-dimethylimidazo[1,2-b]pyridazyl); B is monocyclic heterocyclyl (e.g., piperidinyl); L¹ and L² are absent; Y is C(R⁶a) (e.g., CH); R² is hydrogen; m is 0; and n is 1. In some embodiments, the compound of Formula (V) is Compound 309, or a pharmaceutically acceptable salt, solvate, hydrate, tautomer, or stereoisomer thereof.

[0432] In some embodiments, for Formula (V), A is bicyclic heterocyclyl (e.g., 2,8-dimethylimidazo[1,2-b]pyridazyl); B is monocyclic heterocyclyl (e.g., N-methyl piperidinyl); L¹ and L² are absent; Y is C(R⁶a) (e.g., CH); R² is hydrogen; m is 0; and n is 1. In some embodiments, the compound of Formula (V) is Compound 310, or a pharmaceutically acceptable salt, solvate, hydrate, tautomer, or stereoisomer thereof.

[0433] In some embodiments, for Formula (V), A is bicyclic heterocyclyl (e.g., 2,8-dimethylimidazo[1,2-b]pyridazyl); B is monocyclic heterocyclyl (e.g., 4-azaspiro[2.5]octanyl); L¹ and L² are absent; Y is N; R² is hydrogen; R³ is halo (e.g., F); m is 1; and n is 1. In some embodiments, the compound of Formula (V) is Compound 312, or a pharmaceutically acceptable salt, solvate, hydrate, tautomer, or stereoisomer thereof.

### Pharmaceutical Compositions, Kits, and Administration

[0434] The present invention provides pharmaceutical compositions comprising a compound of Formula (I), (III), or (V), e.g., a compound of Formula (I), (III), or (V) or a pharmaceutically acceptable salt, solvate, hydrate, tautomer, or stereoisomer, as described herein, and optionally a pharmaceutically acceptable excipient. In certain embodiments, the pharmaceutical composition described herein comprises a compound of Formula (I), (III), or (V) or a pharmaceutically acceptable salt thereof, and optionally a pharmaceutically acceptable excipient. In certain embodiments, the compound of Formula (I), (III), or (V) or a pharmaceutically acceptable salt, solvate, hydrate, tautomer, or stereoisomer thereof, is provided in an effective amount in the pharmaceutical composition. In certain embodiments, the effective amount is a therapeutically effective amount. In certain embodiments, the effective amount is a prophylactically effective amount.

[0435] Pharmaceutical compositions described herein can be prepared by any method known in the art of pharmacology. In general, such preparatory methods include the steps of bringing the compound of Formula (I), (III), or (V) (the “active ingredient”) into association with a carrier and/or one or more other accessory ingredients, and then, if necessary and/or desirable, shaping and/or packaging the product into a desired single- or multi-dose unit.

[0436] Pharmaceutical compositions can be prepared, packaged, and/or sold in bulk, as a single unit dose, and/or as a plurality of single unit doses. As used herein, a “unit dose” is a discrete amount of the pharmaceutical composition comprising a predetermined amount of the active ingredient. The amount of the active ingredient is generally equal to the dosage of the active ingredient which would be administered to a subject and/or a convenient fraction of such a dosage such as, for example, one-half or one-third of such a dosage.

[0437] Relative amounts of the active ingredient, the pharmaceutically acceptable excipient, and/or any additional ingredients in a pharmaceutical composition of the invention will vary, depending upon the identity, size, and/or condition of the subject treated and further depending upon the route by which the composition is to be administered. By way of example, the composition may comprise between 0.1% and 100% (w/w) active ingredient.

[0438] The term “pharmaceutically acceptable excipient” refers to a non-toxic carrier, adjuvant, diluent, or vehicle that does not destroy the pharmacological activity of the compound with which it is formulated. Pharmaceutically acceptable excipients useful in the manufacture of the pharmaceutical compositions of the invention are any of those that are well known in the art of pharmaceutical formulation and include inert diluents, dispersing and/or granulating agents, surface active agents and/or emulsifiers, disintegrating agents, binding agents, preservatives, buffering agents, lubricating agents, and/or oils. Pharmaceutically acceptable excipients useful in the manufacture of the pharmaceutical compositions of the invention include, but are not limited to, ion exchangers, alumina, aluminum stearate, lecithin, serum proteins, such as human serum albumin, buffer substances such as phosphates, glycine, sorbic acid, potassium sorbate, partial glyceride mixtures of saturated vegetable fatty acids, water, salts or electrolytes, such as protamine sulfate, disodium hydrogen phosphate, potassium hydrogen phosphate, sodium chloride, zinc salts, colloidal silica, magnesium trisilicate, polyvinyl pyrrolidone, cellulose-based substances, polyethylene glycol, sodium carboxymethylcellulose, polyacrylates, waxes, polyethylene-polyoxypropylene-block polymers, polyethylene glycol and wool fat.

[0439] Compositions of the present invention may be administered orally, parenterally (including subcutaneous, intramuscular, intravenous and intradermal), by inhalation spray, topically, rectally, nasally, buccally, vaginally or via an implanted reservoir. In some embodiments, provided compounds or compositions are administrable intravenously and/or orally.

[0440] The term “parenteral” as used herein includes subcutaneous, intravenous, intramuscular, intraocular, intravitreal, intra-articular, intra-synovial, intrasternal, intrathecal, intrahepatic, intraperitoneal intralesional and intracranial injection or infusion techniques. Preferably, the compositions are administered orally, subcutaneously, intraperitoneally, or intravenously. Sterile injectable forms of the compositions of this invention may be aqueous or oleaginous suspension. These suspensions may be formulated according to techniques known in the art using suitable dispersing or wetting agents and suspending agents. The sterile injectable preparation may also be a sterile injectable solution or suspension in a non-toxic parenterally acceptable diluent or solvent, for example as a solution in 1,3-butanediol. Among the acceptable vehicles and solvents that may be employed are water, Ringer's solution and isotonic sodium chloride solution. In addition, sterile, fixed oils are conventionally employed as a solvent or suspending medium.

[0441] Pharmaceutically acceptable compositions of this invention may be orally administered in any orally acceptable dosage form including, but not limited to, capsules, tablets, aqueous suspensions or solutions. In the case of tablets for oral use, carriers commonly used include lactose and corn starch. Lubricating agents, such as magnesium stearate, are also typically added. For oral administration in a capsule form, useful diluents include lactose and dried cornstarch. When aqueous suspensions are required for oral use, the active ingredient is combined with emulsifying and suspending agents. If desired, certain sweetening, flavoring or coloring agents may also be added. In some embodiments, a provided oral formulation is formulated for immediate release or sustained/delayed release. In some embodiments, the composition is suitable for buccal or sublingual administration, including tablets, lozenges and pastilles. A provided compound can also be in micro-encapsulated form.

[0442] Alternatively, pharmaceutically acceptable compositions of this invention may be administered in the form of suppositories for rectal administration. Pharmaceutically acceptable compositions of this invention may also be administered topically, especially when the target of treatment includes areas or organs readily accessible by topical application, including diseases of the eye, the skin, or the lower intestinal tract. Suitable topical formulations are readily prepared for each of these areas or organs.

[0443] For ophthalmic use, provided pharmaceutically acceptable compositions may be formulated as micronized suspensions or in an ointment such as petrolatum.

[0444] In order to prolong the effect of a drug, it is often desirable to slow the absorption of the drug from subcutaneous or intramuscular injection. This can be accomplished by the use of a liquid suspension of crystalline or amorphous material with poor water solubility. The rate of absorption of the drug then depends upon its rate of dissolution which, in turn, may depend upon crystal size and crystalline form. Alternatively, delayed absorption of a parenterally administered drug form is accomplished by dissolving or suspending the drug in an oil vehicle.

[0445] Although the descriptions of pharmaceutical compositions provided herein are principally directed to pharmaceutical compositions which are suitable for administration to humans, it will be understood by the skilled artisan that such compositions are generally suitable for administration to animals of all sorts. Modification of pharmaceutical compositions suitable for administration to humans in order to render the compositions suitable for administration to various animals is well understood, and the ordinarily skilled veterinary pharmacologist can design and/or perform such modification with ordinary experimentation.

[0446] Compounds provided herein are typically formulated in dosage unit form, e.g., single unit dosage form, for ease of administration and uniformity of dosage. It will be understood, however, that the total daily usage of the compositions of the present invention will be decided by the attending physician within the scope of sound medical judgment. The specific therapeutically effective dose level for any particular subject or organism will depend upon a variety of factors including the disease being treated and the severity of the disorder; the activity of the specific active ingredient employed; the specific composition employed; the age, body weight, general health, sex and diet of the subject; the time of administration, route of administration, and rate of excretion of the specific active ingredient employed; the duration of the treatment; drugs used in combination or coincidental with the specific active ingredient employed; and like factors well known in the medical arts.

[0447] The exact amount of a compound required to achieve an effective amount will vary from subject to subject, depending, for example, on species, age, and general condition of a subject, severity of the side effects or disorder, identity of the particular compound(s), mode of administration, and the like. The desired dosage can be delivered three times a day, two times a day, once a day, every other day, every third day, every week, every two weeks, every three weeks, or every four weeks. In certain embodiments, the desired dosage can be delivered using multiple administrations (e.g., two, three, four, five, six, seven, eight, nine, ten, eleven, twelve, thirteen, fourteen, or more administrations).

[0448] In certain embodiments, an effective amount of a compound for administration one or more times a day to a 70 kg adult human may comprise about 0.0001 mg to about 3000 mg, about 0.0001 mg to about 2000 mg, about 0.0001 mg to about 1000 mg, about 0.001 mg to about 1000 mg, about 0.01 mg to about 1000 mg, about 0.1 mg to about 1000 mg, about 1 mg to about 1000 mg, about 1 mg to about 100 mg, about 10 mg to about 1000 mg, or about 100 mg to about 1000 mg, of a compound per unit dosage form.

[0449] In certain embodiments, the compounds of Formula (I), (III), or (V) may be at dosage levels sufficient to deliver from about 0.001 mg/kg to about 100 mg/kg, from about 0.01 mg/kg to about 50 mg/kg, preferably from about 0.1 mg/kg to about 40 mg/kg, preferably from about 0.5 mg/kg to about 30 mg/kg, from about 0.01 mg/kg to about 10 mg/kg, from about 0.1 mg/kg to about 10 mg/kg, and more preferably from about 1 mg/kg to about 25 mg/kg, of subject body weight per day, one or more times a day, to obtain the desired therapeutic effect.

[0450] It will be appreciated that dose ranges as described herein provide guidance for the administration of provided pharmaceutical compositions to an adult. The amount to be administered to, for example, a child or an adolescent can be determined by a medical practitioner or person skilled in the art and can be lower or the same as that administered to an adult.

[0451] It will be also appreciated that a compound or composition, as described herein, can be administered in combination with one or more additional pharmaceutical agents. The compounds or compositions can be administered in combination with additional pharmaceutical agents that improve their bioavailability, reduce and/or modify their metabolism, inhibit their excretion, and/or modify their distribution within the body. It will also be appreciated that the therapy employed may achieve a desired effect for the same disorder, and/or it may achieve different effects.

[0452] The compound or composition can be administered concurrently with, prior to, or subsequent to, one or more additional pharmaceutical agents, which may be useful as, e.g., combination therapies. Pharmaceutical agents include therapeutically active agents. Pharmaceutical agents also include prophylactically active agents. Each additional pharmaceutical agent may be administered at a dose and/or on a time schedule determined for that pharmaceutical agent. The additional pharmaceutical agents may also be administered together with each other and/or with the compound or composition described herein in a single dose or administered separately in different doses. The particular combination to employ in a regimen will take into account compatibility of the inventive compound with the additional pharmaceutical agents and/or the desired therapeutic and/or prophylactic effect to be achieved. In general, it is expected that the additional pharmaceutical agents utilized in combination be utilized at levels that do not exceed the levels at which they are utilized individually. In some embodiments, the levels utilized in combination will be lower than those utilized individually.

[0453] Exemplary additional pharmaceutical agents include, but are not limited to, anti-proliferative agents, anti-cancer agents, anti-diabetic agents, anti-inflammatory agents, immunosuppressant agents, and a pain-relieving agent Pharmaceutical agents include small organic molecules such as drug compounds (e.g., compounds approved by the U.S. Food and Drug Administration as provided in the Code of Federal Regulations (CFR)), peptides, proteins, carbohydrates, monosaccharides, oligosaccharides, polysaccharides, nucleoproteins, mucoproteins, lipoproteins, synthetic polypeptides or proteins, small molecules linked to proteins, glycoproteins, steroids, nucleic acids, DNAs, RNAs, nucleotides, nucleosides, oligonucleotides, antisense oligonucleotides, lipids, hormones, vitamins, and cells.

[0454] Also encompassed by the invention are kits (e.g., pharmaceutical packs). The inventive kits may be useful for preventing and/or treating a proliferative disease or a non-proliferative disease, e.g., as described herein. The kits provided may comprise an inventive pharmaceutical composition or compound and a container (e.g., a vial, ampule, bottle, syringe, and/or dispenser package, or other suitable container). In some embodiments, provided kits may optionally further include a second container comprising a pharmaceutical excipient for dilution or suspension of an inventive pharmaceutical composition or compound. In some embodiments, the inventive pharmaceutical composition or compound provided in the container and the second container are combined to form one-unit dosage form.

[0455] Thus, in one aspect, provided are kits including a first container comprising a compound described herein, or a pharmaceutically acceptable salt, solvate, hydrate, tautomer, or stereoisomer thereof, or a pharmaceutical composition thereof. In certain embodiments, the kit of the disclosure includes a first container comprising a compound described herein, or a pharmaceutically acceptable salt thereof, or a pharmaceutical composition thereof. In certain embodiments, the kits are useful in preventing and/or treating a disease, disorder, or condition described herein in a subject (e.g., a proliferative disease or a non-proliferative disease). In certain embodiments, the kits further include instructions for administering the compound, or a pharmaceutically acceptable salt, solvate, hydrate, tautomer, or stereoisomer thereof, or a pharmaceutical composition thereof, to a subject to prevent and/or treat a proliferative disease or a non-proliferative disease.

### Methods of Use

[0456] Described herein are compounds useful for modulating splicing. In some embodiments, a compound of Formula (I), (III), or (V) may be used to alter the amount, structure, or composition of a nucleic acid (e.g., a precursor RNA, e.g., a pre-mRNA, or the resulting mRNA) by increasing or decreasing splicing at a splice site. In some embodiments, increasing or decreasing splicing results in modulating the level or structure of a gene product (e.g., an RNA or protein) produced. In some embodiments, a compound of Formula (I), (III), or (V) may modulate a component of the splicing machinery, e.g., by modulating the interaction with a component of the splicing machinery with another entity (e.g., nucleic acid, protein, or a combination thereof). The splicing machinery as referred to herein comprises one or more spliceosome components. Spliceosome components may comprise, for example, one or more of major spliceosome members (U1, U2, U4, U5, U6 snRNPs), or minor spliceosome members (U11, U12, U4atac, U6atac snRNPs) and their accessory splicing factors.

[0457] In another aspect, the present disclosure features a method of modifying of a target (e.g., a precursor RNA, e.g., a pre-mRNA) through inclusion of a splice site in the target, wherein the method comprises providing a compound of Formula (I), (III), or (V). In some embodiments, inclusion of a splice site in a target (e.g., a precursor RNA, e.g., a pre-mRNA, or the resulting mRNA) results in addition or deletion of one or more nucleic acids to the target (e.g., a new exon, e.g. a skipped exon). Addition or deletion of one or more nucleic acids to the target may result in an increase in the levels of a gene product (e.g., RNA, e.g., mRNA, or protein).

[0458] In another aspect, the present disclosure features a method of modifying a target (e.g., a precursor RNA, e.g., a pre-mRNA, or the resulting mRNA) through exclusion of a splice site in the target, wherein the method comprises providing a compound of Formula (I), (III), or (V). In some embodiments, exclusion of a splice site in a target (e.g., a precursor RNA, e.g., a pre-mRNA) results in deletion or addition of one or more nucleic acids from the target (e.g., a skipped exon, e.g. a new exon). Deletion or addition of one or more nucleic acids from the target may result in a decrease in the levels of a gene product (e.g., RNA, e.g., mRNA, or protein). In other embodiments, the methods of modifying a target (e.g., a precursor RNA, e.g., a pre-mRNA, or the resulting mRNA) comprise suppression of splicing at a splice site or enhancement of splicing at a splice site (e.g., by more than about 0.5%, e.g., 1%, 5%, 10%, 15%, 20%, 25%, 30%, 35%, 40%, 45%, 50%, 55%, 60%, 65%, 70%, 75%, 80%, 85%, 90%, 95%, 99%, or more), e.g., as compared to a reference (e.g., the absence of a compound of Formula (I), (III), or (V), or in a healthy or diseased cell or tissue).

[0459] The methods described herein can be used to modulate splicing, e.g., of a nucleic acid comprising a particular sequence (e.g., a target sequence). Exemplary genes encoding a target sequence (e.g., a target sequence comprising DNA or RNA, e.g., pre-mRNA) include, inter alia, ABCA4, ABCA9, ABCB1, ABCB5, ABCC9, ABCD1, ACADL, ACADM, ACADSB, ACSS2, ACTB, ACTG2, ADA, ADAL, ADAM10, ADAM15, ADAM22, ADAM32, ADAMTS12, ADAMTS13, ADAMTS20, ADAMTS6, ADAMTS9, ADAR, ADCY3, ADCY 10, ADCY8, ADNP, ADRBK2, AFP, AGL, AGT, AHCTF1, AHR, AKAP10, AKAP3, AKNA, ALAS1, ALS2CL, ALB, ALDH3A2, ALG6, AMBRA1, ANK3, ANTXR2, ANXA10, ANXA11, ANGPTL3, AP2A2, AP4E1, APC, APOA1, APOB, APOC3, APOH, AR, ARID2, ARID3A, ARID3B, ARFGEF1, ARFGEF2, ARHGAP1, ARHGAP8, ARHGAP18, ARHGAP26, ARHGEF18, ARHGEF2, ARPC3, ARS2, ASH1L, ASH1L-IT1, ASNSD1, ASPM, ATAD5, ATF1, ATG4A, ATG16L2, ATM, ATN1, ATP11C, ATP6V1G3, ATP13A5, ATP7A, ATP7B, ATR, ATXN2, ATXN3, ATXN7, ATXN10, AXIN1, B2M, B4GALNT3, BBS4, BCL2, BCL2L1, BCL2-like 11 (BIM), BCL11B, BBOX1, BCS1L, BEAN1, BHLHE40, BMPR2, BMP2K, BPTF, BRAF, BRCA1, BRCA2, BRCC3, BRSK1, BRSK2, BTAF1, BTK, C2orf55, C4orf29, C6orf118, C9orf43, C9orf72, C10orf137, C11orf30, C11orf65, C11orf70, C11orf87, C12orf51, C13orf1, C13orf15, C14orf101, C14orf118, C15orf29, C15orf42, C15orf60, C16orf33, C16orf38, C16orf48, C18orf8, C19orf42, C1orf107, C1orf114, C1orf130, C1orf149, C1orf27, C1orf71, C1orf94, C1R, C20orf74, C21orf70, C3orf23, C4orf18, C5orf34, C8B, C8orf33, C9orf114, C9orf86, C9orf98, C3, CA11, CAB39, CACHD1, CACNA1A, CACNA1B, CACNA1C, CACNA2D1, CACNA1G, CACNA1H, CALCA, CALCOCO2, CAMK1D, CAMKK1, CAPN3, CAPN9, CAPSL, CARD11, CARKD, CASZ1, CAT, CBLB, CBX1, CBX3, CCDC102B, CCDC11, CCDC15, CCDC18, CCDC5, CCDC81, CCDC131, CCDC146, CD4, CD274, CD1B, CDC14A, CDC16, CDC2L5, CDC42BPB, CDCA8, CDH10, CDH11, CDH24, CDH8, CDH9, CDK5RAP2, CDK6, CDK8, CDK11B, CD33, CD46, CDH1, CDH23, CDK6, CDK11B, CDK13, CEBPZ, CEL, CELSR3, CENPA, CENPI, CENPT, CENTB2, CENTG2, CEP110, CEP170, CEP192, CETP, CFB, CFTR, CFH, CGN, CGNL1, CHAF1A, CHD9, CHIC2, CHL1, CHN1, CHM, CLEC16A, CL1C2, CLCN1, CLINT1, CLK1, CLPB, CLPTM1, CMIP, CMYA5, CNGA3, CNOT1, CNOT7, CNTN6, COG3, COL11A1, COL11A2, COL12A1, COL14A1, COL15A1, COL17A1, COL19A1, COL1A1, COL1A2, COL2A1, COL3A1, COL4A1, COL4A2, COL4A5, COL4A6, COL5A2, COL6A1, COL7A1, COL9A1, COL9A2, COL22A1, COL24A1, COL25A1, COL29A1, COLQ, COMTD1, COPA, COPB2, COPS7B, COPZ2, CPSF2, CPXM2, CR1, CRBN, CRYZ, CREBBP, CRKRS, CSE1L, CSTB, CSTF3, CT45-6, CTNNB1, CUBN, CUL4B, CUL5, CXorf41, CXXC1, CYBB, CYFIP2, CYP3A4, CYP3A43, CYP3A5, CYP4F2, CYP4F3, CYP17, CYP19, CYP24A1, CYP27A1, DAB1, DAZ2, DCBLD1, DCC, DCTN3, DCUN1D4, DDA1, DDEF1, DDX1, DDX24, DDX4, DENND2D, DEPDC2, DES, DGAT2, DHFR, DHRS7, DHRS9, DHX8, DIP2A, DMD, DMTF1, DNAH3, DNAH8, DNAI1, DNAJA4, DNAJC13, DNAJC7, DNMT1, DNTTIP2, DOCK4, DOCK5, DOCK10, DOCK11, DOT1L, DPP3, DPP4, DPY19L2P2, DR1, DSCC1, DVL3, DUX4, DYNC1H1, DYSF, E2F1, E2F3, E2F8, E4F1, EBF1, EBF3, ECM2, EDEM3, EFCAB3, EFCAB4B, EFNA4, EFTUD2, EGFR, EIF3A, ELA1, ELA2A, ELF2, ELF3, ELF4, EMCN, EMD, EML5, ENO3, ENPP3, EP300, EPAS1, EPB41L5, EPHA3, EPHA4, EPHB1, EPHB2, EPHB3, EPS15, ERBB4, ERCC1, ERCC8, ERGIC3, ERMN, ERMP1, ERN1, ERN2, ESR1, ESRRG, ETS2, ETV3, ETV4, ETV5, ETV6, EVC2, EWSR1, EXO1, EXOC4, F3, F11, F13A1, F5, F7, F8, FAH, FAM13A1, FAM13B1, FAM13C1, FAM134A, FAM161A, FAM176B, FAM184A, FAM19A1, FAM20A, FAM23B, FAM65C, FANCA, FANCC, FANCG, FANCM, FANK1, FAR2, FBN1, FBXO15, FBXO18, FBXO38, FCGBP, FECH, FEZ2, FGA, FGD6, FGFR2, FGFR1OP, FGFR1OP2, FGFR2, FGG, FGR, FIX, FKBP3, FLI1, FLJ35848, FLJ36070, FLNA, FN1, FNBP1L, FOLH1, FOSL1, FOSL2, FOXK1, FOXM1, FOXO1, FOXP4, FRAS1, FUT9, FXN, FZD3, FZD6, GAB1, GABPA, GALC, GALNT3, GAPDH, GART, GAS2L3, GATA3, GATAD2A, GBA, GBGT1, GCG, GCGR, GCK, GFI1, GFM1, GHI, GHR, GHV, GJA1, GLA, GLT8D1, GNA11, GNAQ, GNAS, GNB5, GOLGB1, GOLT1A, GOLT1B, GPATCH1, GPR158, GPR160, GPX4, GRAMD3, GRHL1, GRHL2, GRHPR, GRIA1, GRIA3, GRIA4, GRIN2B, GRM3, GRM4, GRN, GSDMB, GSTCD, GSTO2, GTF2I, GTPBP4, HADHA, HAND2, HBA2, HBB, HCK, HDAC3, HDAC5, HDX, HEPACAM2, HERC1, HES7, HEXA, HEXB, HHEX, HIPK3, HLA-DPB1, HLA-G, HLCS, HLTF, HMBS, HMGA1, HMGCL, HNF1A, HNF1B, HNF4A, HNF4G, HNRNPHJ, HOXC10, HP1BP3, HPGD, HPRT1, HPRT2, HSF1, HSF4, HSF2BP, HSPA9, HSPG2, HTT, HXA, ICA1, IDH1, IDS, IFI44L, IKBKAP, IKZF1, IKZF3, IL1R2, IL5RA, IL7RA, MUT, INPP5D, INSR, INTS3, INTU, IP04, IP08, IQGAP2, IRF2, IRF4, IRF8, IRX3, ISL1, ISL2, ITFG1, ITGA6, ITGAL, ITGB1, ITGB2, 1TGB3, ITGB4, ITIH1, ITPR2, IWS1, JAK1, JAK2, JAG1, JMJD1C, JPH3, KALRN, KAT6A, KATNAL2, KCNN2, KCNT2, KDM2A, KIAA0256, KIAA0528, KIAA0564, KIAA0586, KIAA1033, KIAA1166, KIAA1219, KIAA1409, KIAA1622, KIAA1787, KIF3B, KIF15, KIF16B, KIF5A, KIF5B, KIF9, KIN, KIR2DL5B, KIR3DL2, KIR3DL3, KIT, KLF3, KLF5, KLF7, KLF10, KLF12, KLF16, KLHL20, KLK12, KLKB1, KMT2A, KMT2B, KPNA5, KRAS, KREMEN1, KRIT1, KRT5, KRTCAP2, KYNU, L1CAM L3MBTL, L3MBTL2, LACE1, LAMA1, LAMA2, LAMA3, LAMB1, LARP7, LDLR, LEF1, LENG1, LGALS3, LGMN, LHCGR, LHX3, LHX6, LIMCH1, LIMK2, LIN28B, LIN54, LMBRD1, LMBRD2, LMLN, LMNA, LMO2, LMO7, LOC389634, LOC390110, LPA, LPCAT2, LPL, LRP4, LRPPRC, LRRK2, LRRC19, LRRC42, LRWD1, LUM, LVRN, LYN, LYST, MADD, MAGI1, MAGT1, MALT1, MAP2K1, MAP4K4, MAPK8IP3, MAPK9, MAPT, MARC1, MARCH5, MATN2, MBD3, MCF2L2, MCM6, MDGA2, MDM4, ASXL1, FUS, SPR54, MECOM, MEF2C, MEF2D, MEGF10, MEGF11, MEMO1, MET, MGA, MGAM, MGAT4A, MGAT5, MGC16169, MGC34774, MKKS, MIB1, MIER2, MITF, MKL2, MLANA, MLH1, MLL5, MLX, WE, MPDZ, MPI, MRAP2, MRPL11, MRPL39, MRPS28, MRPS35, MS4A13, MSH2, MSH3, MSMB, MST1R, MTDH, MTERF3, MTF1, MTF2, MTIF2, MTHFR, MUC2, MUT, MVK, MYB, MYBL2, MYC, MYCBP2, MYH2, MYRF, MYT1, MY019, MY03A, MY09B, MYOM2, MYOM3, NAG, NARG1, NARG2, NCOA1, NDC80, NDFIP2, NEB, NEDD4, NEK1, NEK5, NEK11, NF1, NF2, NFATC2, NFE2L2, NFIA, NFIB, NFIX, NFKB1, NFKB2, NFKBIL2, NFRKB, NFYA, NFYB, NIPA2, NKAIN2, NKAP, NLRC3, NLRC5, NLRP3, NLRP7, NLRP8, NLRP13, NME1, NME1-NME2, NME2, NME7, NOL10, NOP561, NOS1, NOS2A, NOTCH1, NPAS4, NPM1, NR1D1, NR1H3, NR1H4, NR4A3, NR5A1, NRXN1, NSMAF, NSMCE2, NT5C, NT5C2, NT5C3, NUBP1, NUBPL, NUDT5, NUMA1, NUP88, NUP98, NUP160, NUPL1, OAT, OAZ1, OBFC2A, OBFC2B, OLIG2, OMA1, OPA1, OPN4, OPTN, OSBPL11, OSBPL8, OSGEPL1, OTC, OTX2, OVOL2, OXT, PA2G4, PADI4, PAH, PAN2, PAOX, PAPOLG, PARD3, PARP1, PARVB, PAWR, PAX3, PAX8, PBGD, PBRM1, PBX2, PCBP4, PCCA, PCGF2, PCNX, PCOTH, PDCD4, PDE4D, PDE8B, PDE10A, PD1A3, PDH1, PDLIM5, PDXK, PDZRN3, PELI2, PDK4, PDS5A, PDS5B, PGK1, PGM2, PHACTR4, PHEX, PHKB, PHLDB2, PHOX2B, PHTF1, PIAS1, PIEZO1, PIGF, PIGN, PIGT, PIK3C2G, PIK3CA, PIK3CD, PIK3CG, PIK3RI, PIP5K1A, PITRM1, PIWIL3, PKD1, PKHD1L1, PKD2, PKIB, PKLR, PKM1, PKM2, PLAGL2, PLCB1, PLCB4, PLCG1, PLD1, PLEKHA5, PLEKHA7, PLEKHM1, PLKR, PLXNC1, PMFBP1, POLN, POLR3D, POMT2, POSTN, POU2AF1, POU2F2, POU2F3, PPARA, PPFIA2, PPP1R12A, PPP3CB, PPP4C, PPP4R1L, PPP4R2, PRAME, PRC1, PRDM1, PREX1, PREX2, PRIM1, PRIM2, PRKAR1A, PRKCA, PRKG1, PRMT7, PROC, PROCR, PROSC, PRODH, PROX1, PRPF40B, PRPF4B, PRRG2, PRUNE2, PSD3, PSEN1, PSMAL, PTCH1, PTEN, PTK2, PTK2B, PTPN2, PTPN3, PTPN4, PTPN11, PTPN22, PTPRD, PTPRK, PTPRM, PTPRN2, PTPRT, PUS10, PVRL2, PYGM, QRSL1, RAB11FIP2, RAB23, RAF1, RALBP1, RALGDS, RB1CC1, RBL2, RBM39, RBM45, RBPJ, RBSN, REC8, RELB, RFC4, RFT1, RFTN1, RHOA, RHPN2, RIF1, RIT1, RLN3, RMND5B, RNF11, RNF32, RNFT1, RNGTT, ROCK1, ROCK2, RORA, RP1, RP6KA3, RP11-265F1, RP13-36C9, RPAP3, RPN1, RPGR, RPL22, RPL22L1, RPS6KA6, RREB1, RRM1, RRP1B, RSK2, RTEL1, RTF1, RUFY1, RUNX1, RUNX2, RXRA, RYR3, SAAL1, SAE1, SALL4, SAT1, SATB2, SBCAD, SCN1A, SCN2A, SCN3A, SCN4A, SCN5A, SCN8A, SCNA, SCN11A, SCO1, SCYL3, SDC1, SDK1, SDK2, SEC24A, SEC24D, SEC31A, SEL1L, SENP3, SENP6, SENP7, SERPINA1, SETD3, SETD4, SETDB1, SEZ6, SFRS12, SGCE, SGOL2, SGPL1, SH2D1A, SH3BGRL2, SH3PXD2A, SH3PXD2B, SH3RF2, SH3TC2, SHOC2, SIPA1L2, SIPA1L3, SIVA1, SKAP1, SKIV2L2, SLC6A11, SLC6A13, SLC6A6, SLC7A2, SLC12A3, SLC13A1, SLC22A17, SLC25A14, SLC28A3, SLC33A1, SLC35F6, SLC38A1, SLC38A4, SLC39A10, SLC4A2, SLC6A8, SMARCA1, SMARCA2, SMARCA5, SMARCC2, SMC5, SMN2, SMOX, SMS, SMTN, SNCAIP, SNORD86, SNRK, SNRP70, SNX5, SNX6, SOD1, SOD10, SOS, SOS2, SOX5, SOX6, SOX8, SP1, SP2, SP3, SP110, SPAG9, SPATA13, SPATA4, SPATS1, SPECC1L, SPDEF, SPI1, SPINK5, SPP2, SPTA1, SRF, SRM, SRP72, SSX3, SSX5, SSX9, STAG1, STAG2, STAMBPLI, STARD6, STAT1, STAT3, STAT5A, STAT5B, STATE, STK17B, STX3, STXBP1, SUCLG2, SULF2, SUPT6H, SUPT16H, SV2C, SYCP2, SYT6, SYCPI, SYTL3, SYTL5, TAF2, TARDBP, TBC1D3G, TBC1D8B, TBC1D26, TBC1D29, TBCEL, TBK1, TBP, TBPL1, TBR1, TBX, TCEB3, TCF3, TCF4, TCF7L2, TCFL5, TCF12, TCP11L2, TDRD3, TEAD1, TEAD3, TEAD4, TECTB, TEK, TERF1, TERF2, TET2, TFAP2A, TFAP2B, TFAP2C, TFAP4, TFDP1, TFRC, TG, TGM7, TGS1, THAP7, THAP12, THOC2, TIAL1, TIAM2, TIMM50, TLK2, TM4SF20, TM6SF1, TMEM27, TMEM77, TMEM56, TMEM94A, TMF1, TMPRSS6, TNFRSF10A, TNFRSF10B, TNFRSF8, TNK2, TNKS, TNKS2, TOM1L1, TOM1L2, TOP2B, TP53, TP53INP1, TP53BP2, TP53I3, TP63, TRAF3IP3, TRAPPC2, TRIM44, TRIM65, TRIML1, TRIML2, TRPM3, TRPM5, TRPM7, TRPS1, TSC1, TSC2, TSHB, TSPAN7, TTC17, TTF1, TTLL5, TTLL9, TTN, TTPAL, TTR, TUSC3, TXNDC10, UBE3A, UCK1, UGT1A1, UHRF1BP1, UNC45B, UNC5C, USH2A, USF2, USPJ, USP6, USP18, USP38, USP39, UTP20, UTP15, UTP18, UTRN, UTX, UTY, UVRAG, UXT, VAPA, VEGFA, VPS29, VPS35, VPS39, VT11A, VT11B, VWA3B, WDFY2, WDR16, WDR17, WDR26, WDR44, WDR67, WDTC1, WRN, WRNIP1, WT1, WWC3, XBP1, XRN1, XRN2, XX-FW88277, YAP1, YARS, YBX1, YGM, YY1, ZBTB18, ZBTB20, ZC3HAV1, ZC3HC1, ZC3H7A, ZDHHC19, ZEB1, ZEB2, ZFPM1, ZFYVE1, ZFX, ZIC2, ZNF37A, ZNF91, ZNF114, ZNF155, ZNF169, ZNF205, ZNF236, ZNF317, ZNF320, ZNF326, ZNF335, ZNF365, ZNF367, ZNF407, ZNF468, ZNF506, ZNF511, ZNF511-PRAP1, ZNF519, ZNF521, ZNF592, ZNF618, ZNF763, and ZWINT.

[0460] Additional exemplary genes encoding a target sequence (e.g., a target sequence comprising DNA or RNA, e.g., pre-mRNA) include genes include A1ICF, A4GALT, AAR2, ABAT, ABCA11P, ZNF721, ABCA5, ABHD10, ABHD13, ABHD2, ABHD6, AC000120.3, KRIT1, AC004076.1, ZNF772, AC004076.9, ZNF772, AC004223.3, RAD51D, AC004381.6, AC006486.1, ERF, AC007390.5, AC007780.1, PRKAR1A, AC007998.2, INO80C, AC009070.1, CMC2, AC009879.2, AC009879.3, ADHFE1, AC010487.3, ZNF816-ZNF321P, ZNF816, AC010328.3, AC010522.1, ZNF587B, AC010547.4, ZNF19, AC012313.3, ZNF497, AC012651.1, CAPN3, AC013489.1, DET1, AC016747.4, C2orf74, ACO20907.6, FXYD3, AC021087.5, PDCD6, AHRR, AC022137.3, ZNF761, AC025283.3, NAA60, AC027644.4, RABGEF1, AC055811.2, FLCN, AC069368.3, ANKDD1A, AC073610.3, ARF3, AC074091.1,GPN1, AC079447.1, LIPT1, AC092587.1, AC079594.2, TRIM59, AC091060.1,C18orf21, AC092143.3, MC1R, AC093227.2, ZNF607, AC093512.2, ALDOA, AC098588.1, ANAPC10, AC107871.1, CALML4, AC114490.2, ZMYM6, AC138649.1, NIPA1, AC138894.1, CLN3, AC139768.1, AC242426.2, CHD1L, ACADM, ACAP3, ACKR2,RP11-141M3.5, KRBOX1, ACMSD, ACOT9, ACPS, ACPL2, ACSBG1, ACSF2, ACSF3, ACSL1, ACSL3, ACVR1, ADAL, ADAM29, ADAMTS10, ADAMTSL5, ADARB1, ADAT2, ADCK3, ADD3, ADGRG1, ADGRG2, ADH1B, ADIPOR1, ADNP, ADPRH, AGBL5, AGPAT1, AGPAT3, AGR2, AGTR1, AHDC1, AHI1, AHNAK, AIFM1, AIFM3, AIMP2, AK4, AKAP1, AKNAD1, CLCC1, AKR1A1, AKT1, AKT1S1, AKT2, AL139011.2, PEX19, AL157935.2, ST6GALNAC6, AL358113.1,TJP2, AL441992.2, KYAT1, AL449266.1,CLCC1, AL590556.3, LINC00339, CDC42, ALAS1, ALB, ALDH16A1, ALDH1B1, ALDH3A1, ALDH3B2, ALDOA, ALKBH2, ALPL, AMD1, AMICA1, AMN1, AMOTL2, AMY1B, AMY2B, ANAPC10, ANAPC11, ANAPC15, ANG, RNASE4, AL163636.2, ANGEL2, ANGPTL1, ANKMY1, ANKRD11, ANKRD28, ANKRD46, ANKRD9, ANKS3, ANKS3,RP11-127120.7, ANKS6, ANKZF1, ANPEP, ANXA11, ANXA2, ANXA8L2, AL603965.1, AOC3, AP000304.12, CRYZL1, AP000311.1, CRYZL1, AP000893.2,RAB30, AP001267.5, ATP5MG, AP002495.2, AP003175.1, OR2AT4, AP003419.1, CLCF1, AP005263.1, ANKRD12, AP006621.5, AP006621.1, AP1G1, AP3M1, AP3M2, APBA2, APBB1, APLP2, APOA2, APOL1, APOL3, APTX, ARAP1, STARD10, ARF4, ARFIP1, ARFIP2, ARFRP1, ARHGAP11A, ARHGAP33, ARHGAP4, ARHGEF10, ARHGEF3, ARHGEF35, OR2A1-AS1, ARHGEF35, OR2A1-AS1, ARHGEF34P, ARID1B, ARHGEF35, OR2A20P, OR2A1-AS1, ARHGEF9, ARL1, ARL13B, ARL16, ARL6, ARMC6, ARMC8, ARMCX2, ARMCX5, RP4-769N13.6, ARMCX5-GPRASP2, BHLHB9, ARMCX5-GPRASP2,GPRASP1, ARMCX5-GPRASP2,GPRASP2, ARMCX6, ARNT2, ARPP19, ARRB2, ARSA, ARTS, ASB3,GPR75-ASB3, ASCC2, ASNS, ASNS, AC079781.5, ASPSCR1, ASS1, ASUN, ATE1, ATF1, ATF7IP2, ATG13, ATG4D, ATG7, ATG9A, ATM, ATOX1, ATP1B3, ATP2C1, ATP5F1A, ATPSG2, ATPSJ, ATP5MD, ATP5PF, ATP6AP2, ATP6V0B, ATP6V1C1, ATP6V1D, ATP7B, ATXN1, ATXN1L,IST1, ATXN3, ATXN7L1, AURKA, AURKB, AXDND1, B3GALNT1, B3GALT5, AF064860.1, B3GALT5,AF064860.5, B3GNT5, B4GALT3, B4GALT4, B9D1, BACH1, BAIAP2, BANF1, BANF2, BAX, BAZ2A, BBIP1, BCHE, BCL2L14, BCL6, BCL9L, BCS1L, BDH1, BDKRB2,AL355102.2, BEST1, BEST3, BEX4, BHLHB9, BID, BIN3, BIRC2, BIVM, BIVM-ERCC5, BIVM, BLCAP, BLK, BLOC1S1, RP11-644F5.10, BLOC1S6, AC090527.2, BLOC1S6, RP11-96020.4, BLVRA, BMF, BOLA1, BORCS8-MEF2B, BORCS8, BRCA1, BRD1, BRDT, BRINP3, BROX, BTBD10, BTBD3, BTBD9, BTD, BTF3L4, BTNL9, BUB1B-PAK6, PAK6, BUB3, C10orf68, C11orf1, C11orf48, C11orf54, C11orf54,AP001273.2, C11orf57, C11orf63, C11orf82, C12orf23, C12orf4, C12orf65, C12orf79, C14orf159, C14orf93, C17orf62, C18orf21, C19orf12, C19orf40, C19orf47, C19orf48, C19orf54, CID, C1GALT1, C1QB, C1QTNF1, C1S, C1orf101, C1orf112, C1orf116, C1orf159, C1orf63, C2, C2,CFB, C20orf27, C21orf58, C2CD4D, C2orf15, LIPT1, MRPL30, C2orf80, C2orf81, C3orf14, C3orf1 7, C3orf18, C3orf22, C3orf33,AC104472.3, C4orf33, C5orf28, C5orf34, C6orf118, C6orf203, C6orf211, C6orf48, C7orf50, C7orf55, C7orf55-LUC7L2, LUC7L2, C8orf44-SGK3,C8orf44, C8orf59, C9,DAB2, C9orf153, C9orf9, CA5BPI,CA5B, CABYR, CALCA, CALCOCO1, CALCOCO2, CALM1, CALM3, CALML4, RP11-315D16.2, CALN1, CALU, CANT1, CANX, CAP1, CAPN12, CAPS2, CARD8, CARHSP1, CARNS1, CASC1, CASP3, CASP7, CBFA2T2, CBS, CBY1, CCBL1, CCBL2, RBMXL1, CCDC12, CCDC126, CCDC14, CCDC149, CCDCI50, CCDC169-SOHLH2, CCDC169, CCDC171, CCDC37, CCDC41, CCDC57, CCDC63, CCDC7, CCDC74B, CCDC77, CCDC82, CCDC90B, CCDC91, CCDC92, CCNE1, CCHCR1, CCL28, CCNB1IP1, CCNC, CCND3, CCNG1, CCP110, CCR9, CCT7, CCT8, CD151, CD1D, CD200, CD22, CD226, CD276, CD36, CD59, CDC26, CDC42, CDC42SE1, CDC42SE2, CDHR3, CDK10, CDK16, CDK4, CDKAL1, CDKL3,CTD-2410N18.4, CDKN1A, CDKN2A, CDNF, CEBPZOS, CELF1, CEMIP, CENPK, CEP170B, CEP250, CEP57, CEP57L1, CEP63, CERS4, CFL1, CFL2, CFLAR, CGNL1, CHCHD7, CHD1L, CHD8, CHFR,ZNF605, CHIA, CHID1, CHL1, CHM, CHMP1A, CHMP3, RNF103—CHMP3, CHRNA2, CIDEC, CIRBP, CITED1, CKLF-CMTM1, CMTM1, CKMT1B, CLDN12,CTB-13L3.1, CLDND1,AC021660.3, CLDND1,CPOX, CLHC1, CLIP1, CLUL1, CMC4, MTCP1, CNDP2, CNFN, CNOT1, CNOT6, CNOT7, CNOT8, CNR1, CNR2, CNTFR, CNTRL, COA1, COASY, COCH, COL8A1, COLCA1, COLEC11, COMMD3-BM11, BMI1, COPS5, COPS7B, COQ8A, CORO6, COTL1, COX14,RP4-60503.4, COX7A2, COX7A2L, COX7B2, CPA4, CPA5, CPEB1, CPNE1, AL109827.1, RBM12, CPNE1, RP1-309K20.6, RBM12, CPNE3, CPSF3L, CPT1C, CREB3L2, CREM, CRP, CRYZ, CS,AC073896.1, CS, RP11-977G19.10, CSAD, CSDE1, CSF2RA, CSGALNACT1, CSK, CSNK2A1, CSRNP2, CT45A4, CT45A4,CT45A5, CT45A6, CTBP2, CTCFL, CTD-2116N17.1, KIAA0101, CTD-2349B8.1, SYT17, CTD-2528L19.4, ZNF607, CTD-2619J13.8, ZNF497, CTNNA1, CTNNBIP1, CTNND1, CTPS2, CTSB, CTSL, CTTN, CUL2, CUL9, CWC15, CXorf40B, CYB561A3, CYBC1, CYLD, CYP11A1, CYP2R1, CYP4B1, CYP4F22, DAG1, DAGLB,KDELR2, DARS, DBNL, DCAF11, DCAF8,PEX19, DCLRE1C, DCTD, DCTN1, DCTN4, DCUN1D2, DDR1, DDX11, DDX19B, AC012184.2, DDX19B, RP11-529K1.3, DDX25, DDX39B, ATP6V1G2-DDX39B, SNORD84, DDX42, DDX60L, DEDD, DEDD2, DEFA1, DEFA1B, DEFA1B, DEFA3, DENND1C, DENND2A, DENND4B, DET1, DGKA, DGKZ, DGLUCY, DHRS4L2, DHRS9, DHX40, DIABLO, AC048338.1, DIAPH1, DICER1, DKKL1, DLG1, DLG3, DLST, DMC1, DMKN, DMTF1, DMTN, DNAJC14, DNAJC19, DNAL1, DNASE1L1, DNMT3A, DOC2A, DOCK8, DOK1, DOPEY1, DPAGT1, DPP8, DRAM2, DRD2, DROSHA, DSN1, DTNA, DTX2, DTX3, DUOX1, DUOXA1, DUS2, DUSP10, DUSP13, DUSP18, DUSP22, DYDC1, DYDC2, DYNLL1, DYNLT1, DYRK1A, DYRK2, DYRK4, RP11-500M8.7, DZIP1L, E2F6, ECHDC1, ECSIT, ECT2, EDC3, EDEM1, EDEM2, MMP24-AS1, RP4-614O4.11, EEF1AK1NMT, EEF1D, EFEMP1, EFHC1, EGFL7, EHF, EI24, EIF1AD, EIF2B5, EIF4G1, EIF2B5, POLR2H, EIF3E, EIF3K, EIF4E3, EIF4G1, ELF1, ELMO2, ELMOD1, AP000889.3, ELMOD3, ELOC, ELOF1, ELOVL1, ELOVL7, ELP1, ELP6, EML3, EMP3, ENC1, ENDOV, ENO1, ENPP5, ENTHD2, ENTPD6, EP400NL, EPB41L1, EPDR1, NME8, EPHX1, EPM2A, EPN1, EPN2, EPN3, EPS8L2, ERBB3, ERC1, ERCC1, ERG, ERI2, ERI2, DCUN1D3, ERLIN2, ERMARD, ERRFI1, ESR2,RP11-544I20.2, ESRRA, ESRRB, ESRRG, ETFA, ETFRF1, ETV1, ETV4, ETV7, EVA1A, EVC2, EVX1, EXD2, EXO5, EXOC1, EXOC2, FAAP24, FABP6, FADS1, FADS2, FAHD2B, FAM107B, FAM111A, FAM111B, FAM114A1, FAM114A2, FAM115C, FAM115C,FAM115D, FAM120B, FAM133B, FAM135A, FAM153A, FAM153B, FAM154B, FAM156A, FAM156B, FAM168B, FAM172A, FAM182B, FAM192A, FAM19A2, FAM200B, FAM220A, FAM220A, AC009412.1, FAM222B, FAM227B, FAM234A, AC004754.1, FAM3C, FAM45A, FAM49B, FAM60A, FAM63A, FAM81A, FAM86B1, FAM86B2, FANCI, FANK1, FAR2, FAXC, FAXDC2, FBF1, FBH1, FBXL4, FBXO18, FBXO22, FBXO31, FBXO41, FBXO44, FBXO45, FBXW9, FCHO1, FCHSD2, FDFT1, FDPS, FER, FETUB, FGD4, FGF1, FGFR1, FGFRL1, FGL1, FHL2, FIBCD1, FIGNL1, FIGNL1,DDC, FKBP5, FKRP, FLRT2, FLRT3, FMC1, LUC7L2, FMC1-LUC7L2, FNDC3B, FOLH1, FOLR1, FOXP1, FOXK1, FOXM1, FOXO1, FOXP4, AC097634.4, FOXRED1, FPR1, FPR2, FRG1B, FRS2, FTO, FTSJ1, FUK, FUT10, FUT3, FUT6, FXYD3, FZD3, G2E3, GAA, GABARAPL1, GABPB1, GABRA5, GAL3ST1, GALE, GALNT11, GALNT14, GALNT6, GAPVD1, GARNL3, GAS2L3, GAS8, GATA1, GATA2, GATA4, GBA, GCNT1, GDPD2, GDPD5, GEMIN7,MARK4, GEMIN8, GGA3, GGACT, AL356966.1, GGPS1, GHRL, GIDS, GIGYF2, GIMAP8, GIPC1, GJB1, GJB6, GLB1L, GLI1, GLT8D1, GMFG, GMPR2, GNAI2, GNAQ,GNB1, GNB2, GNE, GNG2, GNGT2, GNPDA1, GNPDA2, GOLGA3,CHFR, GOLGA4, GOLPH3L, GOLT1B, GPBP1L1, GPER1, GPR116, GPR141,EPDR1, GPR155, GPR161, GPR56, GPR63, GPR75-ASB3,ASB3, GPR85, GPSM2, GRAMD1B, GRB10, GRB7, GREM2, GRIA2, GSDMB, GSE1, GSN, GSTA4, GSTZ1, GTDC1, GTF2H1, GTF2H4, VARS2, GTF3C2, GUCY1A3, GUCY1B3, GUK1, GULP1, GYPC, GYS1, GZF1, HAGH, HAO2, HAPLN3, HAVCR1, HAX1, HBG2, AC104389.4, HBG2, AC104389.4, HBE1, HBG2, AC104389.4, HBE1,OR51B5, HBG2,HBE1, AC104389.28, HBS1L, HCFC1R1, HCK, HDAC2, HDAC6, HDAC7, HDLBP, HEATR4, HECTD4, HEXIM2, HHAT, HHATL, CCDC13, HINFP, HIRA, C22orf39, HIVEP3, HJV, HKR1, HLF, HMBOX1, HMGA1, HMGB3, HMGCR, HMGN4, HMOX2, HNRNPC, HNRNPD, HNRNPH1, HNRNPH3, HNRNPR, HOMER3, HOPX, HOXA3, HOXB3, HOXB3,HOXB4, HOXC4, HOXD3, HOXD3,HOXD4, HPCAL1, HPS4, HPS5, HRH1, HS3ST3A1, HSH2D, HSP90AA1, HSPD1, HTT, HUWE1, HYOU1, IAH1, ICA1L, ICAM2, ICE2, ICK, IDH2, IDH3G, IDS, IFI27, IFI44, IFT20, IFT22, IFT88, IGF2, INS-IGF2, IGF2BP3, IGFBP6, IKBKAP, IKBKB, IL11, IL18BP, IL18RAP, IL1RAP, IL1RL1, IL18R1, IL1RN, IL32, IL4I1,NUP62,AC011452.1, IL4I1,NUP62,CTC-326K19.6, IL6ST, ILVBL, IMMP1L, IMPDH1, INCA1, ING1, INIP, INPP1, INPP5J, INPP5K, INSIG2, INTS11, INTS12, INTS14, IP6K2, IP6K3, IPO11, LRRC70, IQCE, IQGAP3, IRAK4, IRF3, IRF5, IRF6, ISG20, IST1, ISYNA1, ITFG2, ITGB1BP1, ITGB7, IT1H4, RP5-966M1.6, ITPRIPL1, JADE1, JAK2, JARID2, JDP2, KANK1, KANK1,RP11-31F19.1, KANK2, KANSL1L, KAT6A, KBTBD2, KBTBD3, KCNAB2, KCNE3, KCNG1, KCNH16, KCNJ9, KCNMB2,AC117457.1,LINC01014, KCTD20, KCTD7,RABGEF1, KDM1B, KDM4A,AL451062.3, KHNYN, KIAA0040, KIAA0125, KIAA0196, KIAA0226L, PPP1R2P4, KIAA0391, KIAA0391, AL121594.1, KIAA0391, PSMA6, KIAA0753, KIAA0895, KIAA0895L, KIAA1191, KIAA1407, KIAA1841, C2orf74, KIF12, KIF14, KIF27, KIF9, KIFC3, KIN, KIRREL1, KITLG, KLC1, APOPT1, AL139300.1, KLC4, KLHDC4, KLHDC8A, KLHL13, KLHL18, KLHL2, KLHL24, KLHL7, KLK11, KLK2, KLKS, KLK6, KLK7, KNOP1, KRBA2, AC135178.2, KRBA2, RP11-849F2.7, KRIT1, KRT15, KRT8, KTN1, KXD1, KYAT3, RBMXL1, KYNU, L3MBTL1, LACC1, LARGE, LARP4, LARP7, LAT2, LBHD1, LCA5, LCA5L, LCTL, LEPROTL1, LGALS8, LGALS9C, LGMN, LHFPL2, LIG4, LIMCH1, LIMK2, LIMS2, LINC00921, ZNF263, LIPF, LLGL2, LMAN2L, LMCD1, LMF1, RP11-161M6.2, LMO1, LMO3, LOXHD1, LPAR1, LPAR2, LPAR4, LPAR5, LPAR6, LPHN1, LPIN2, LPIN3, LPP, LRFN5, LRIF1, LRMP, LRRC14, LRRC20, LRRC24, C8orf82, LRRC39, LRRC42, LRRC48, LRRC4C, LRRC8A, LRRC8B, LRRD1, LRTOMT, LRTOMT, AP000812.5, LSM7, LTB4R, LTBP3, LUC7L2, FMC1-LUC7L2, LUC7L3, LUZP1, LYG1, LYL1, LYPD4, LYPD6B, LYRM1, LYRM5, LYSMD4, MACC1, MAD1L1, MAD1L1, AC069288.1, MAEA, MAFF, MAFG, MAFK, MAGEA12,CSAG4, MAGEA2, MAGEA2B, MAGEA4, MAGEB1, MAGOHB, MAN2A2, MANBAL, MAOB, MAP2K3, MAP3K7CL, MAP3K8, MAP7, MAP9, MAPK6, MAPK7, MAPK8, MAPKAPJ, 10-Mar, 7-Mar, 8-Mar, MARK2, MASP1, MATK, MATR3, MATR3,SNHG4, MB, MBD5, MBNL1, MBOAT7, MCC, MCFD2, MCM9, MCOLN3, MCRS1, MDC1, MDGA2, MDH2, MDM2, ME1, MEAK7, MECR, MED4, MEF2A, MEF2B,BORCS8-MEF2B, MEF2BNB-MEF2B, MEF2B, MEF2BNB, MEF2C, MEF2D, MEGF10, MEI1, MEIS2, MELK, MET, METTL13, METTL23, MFF, MFN2, MFSD2A, MGST3, MIB2, MICAL1, MICAL3, MICOS10, NBL1,MICOS10-NBL1, MID1, MINA, MINOS1-NBL1,MINOS1, MIOS, MIPOL1, MIS12, MKLN1, MKNK1, MKNK1,MOB3C, MLF2, MLH1, MMP17, MOBP, MOCS1, MOGS, MOK, MORF4L1, MPC1, MPC2, MPG, MPI, MPP1, MPP2, MPPE1, MPST, MRAS, MRO, MROH1, MROH7-TTC4, MROH7, MRPL14, MRPL24, MRPL33,BABAM2, MRPL33, BRE, MRPL47, MRPL48, MRPL55, MRRF, MRTFA, MRTFB, MRVI1, MS4A1, MS4A15, MS4A3, MS4A6E,MS4A7,MS4A 14, MSANTD3, MSANTD4, MSH5,MSH5-SAPCD1, MSL2, MSRB3, MSS51, MTCP1, CMC4, MTERF, MTERF1, MTERF3, MTERFD2, MTERFD3, MTF2, MTG2, MTHFD2, MTHFD2L, MTIF2, MTIF3, MTMR10, MTRF1, MTRR, MTUS2, MUTYH, MVK, MX1, MX2, MYH10, MYL12A, MYB, MYD88, MYL5, MYLIP, MYNN, MYO15A, MYO1B, MYOM2, MZF1, N4BP2L2, NAA60, NAB1, NAE1, NAGK, NAP1L1, NAP1L4, NAPG, NARFL, NARG2, NAT1, NAT10, NBPF11, WI2-3658N16. 1, NBPF12, NBPF15, NBPF24, NBPF6, NBPF9, NBR1, NCAPG2, NCBP2, NCEH1, NCOA1, NCOA4, NDC1, NDRG1, NDRG2, NDRG4, NDST1, NDUFAF6, NDUFB2, ND UFC1, ND UFS1, NDUFS8, NDUFV1, NEDD1, NEIL1, NEIL2, NEK10, NEK11, NEK6, NEK9, NELFA, NEU4, NFAT5, NFE2, NFE2L2, AC019080.1, NFRKB, NFYA, NFYC, NIF3L1, NIPA2, NKIRAS1, NKX2-1, NLRC3, NME1,NME1-NME2,NME2, NME1-NME2, NME2, NME4, NME6, NME9, NOD1, NOL10, NOL8, NONO, NPAS1, NPIPA8, RP11-1212A22.1, NPIPB3, NPIPB4, NPIPB9, NPL, NPM1, NPPA, NQO2, NR1H3, NR2C2, NR2F2, NR4A1, NRDC, NREP, NRF1, NRG4, NRIP1, NSD2, NSDHL, NSG1, NSMCE2, NSRP1, NT5C2, NTF4, NTMT1, NTNG2, NUBP2, NUCB2, NUDT1, NUDT2, NUDT4, NUF2, NUMBL, NUP50, NUP54, NUP85, NVL, NXF1, NXPE1, NXPE3, OARD1, OAT, OAZ2, OCIAD1, OCLN, ODF2, OGDHL, OGFOD2, AC026362.1, OGFOD2, RP11-197N18.2, OLA1, OPRL1, OPTN, OR2H1, ORAI2, ORMDL1, ORMDL2, ORMDL3, OSBPL2, OSBPL3, OSBPL5, OSBPL9, OSER1, OSGIN1, OSR2, P2RX4, P2RY2, P2RY6, P4HA2, PABPC1, PACRGL, PACSIN3, PADI1, PAIP2, PAK1, PAK3, PAK4, PAK7, PALB2, PANK2, PAQR6, PARP11, PARVG, PASK, PAX6, PBRM1, PBXIP1, PCBP3, PCBP4,AC115284.1, PCBP4, RP11-155D18.14, RP11-155D18. 12, PCGF3, PCGF5, PCNP, PCSK9, PDCD10, PDCD6, AHRR, PDDC1, PDGFRB, PDIA6, PDIK1L, PDLIM7, PDP1, PDPK1, PDPN, PDZD11, PEA15, PEX2, PEX5, PEX5L, PFKM, PFN4, PGAP2, PGAP2, AC090587.2, PGAP3, PGM3, PGPEP1, PHB, PHC2, PHF20, PHF21A, PHF23, PHKB, PHLDB1, PHOSPHO1, PHOSPHO2, KLHL23, PI4KB, PIAS2, PICALM, PIF1, PIGN, PIGO, PIGT, PIK3CD, PILRB, STAG3LSP-PVRIG2P-PILRB, PIP5K1B, PIR, PISD, PIWIL4,FUT4, PKD2, PKIA, PKIG, PKM, PKN2, PLA1A, PLA2G2A, PLA2G5, PLA2G7, PLAC8, PLAGL1, PLD1, PLD3, PLEKHA1, PLEKHA2, PLEKHA6, PLEKHG5, PLIN1, PLS1, PLS3, PLSCR1, PLSCR2, PLSCR4, PLXNB1, PLXNB2, PMP22, PMS1, PNISR, PNKP,AKT1S1, PNMT, PNPLA4, PNPLA8, PNPO, PNRC1, POC1B, POFUT1, POLB, POLD1, POLH, POLI, POLL, POLR1B, POM121, POM121C,AC006014.7, POM121C, AC211429.1, POMC, POMT1, POP1, PORCN, POU5F1, PSORS1C3, PPARD, PPARG, PPHLN1, PPIL3, PPIL4, PPM1A, PPM1B,AC013717.1, PPP1CB, PPP1R11, PPP1R13L, PPP1R26, PPP1R9A, PPP2R2B, PPP3CA, PPP6R1, PPP6R3, PPT2,PPT2-EGFL8, EGFL8, PPWD1, PRDM2, PRDM8, PRELID3A, PREPL, PRICKLE1, PRKAG1, PRMT2, PRMT5, PRMT7, PROM1, PRPS1, PRPSAP2, PRR14L, PRR15L, PRR5,PRR5-ARHGAP8, PRR5L, PRR7, PRRC2B, PRRT4, PRSS50, PRSS45, PRSS44, PRUNE, PRUNE1, PSEN1, PSMA2, PSMF1, PSORS1C1, PSPH, PSRC1, PTBP3, PTHLH, PTK2, PTPDC1, PTPRM, PUF60, PUM2, PUS1, PUS10, PXN, PXYLP1, PYCR1, QRICH1, R3HCC1L, R3HDM2, RAB17, RAB23, RAB3A, RAB3D,TMEM205, RAB4B-EGLN2, EGLN2, AC008537.1, RABSB, RAB7L1, RABL2A, RABL2B, RABL5, RACGAP1, RAD17, RAD51L3-RFFL, RAD51D, RAD52, RAE1, RAI14, RAI2, RALBP1, RAN, RANGAP1, RAP1A, RAP1B, RAP1GAP, RAPGEF4, RAPGEFL1, RASGRP2, RASSF1, RBCK1, RBM12B, RBM14, RBM4, RBM14-RBM4, RBM23, RBM4, RBM14-RBM4, RBM47, RBM7,AP002373. 1, RBM7, RP11-212D19.4, RBMS2, RBMY1E, RBPJ, RBPMS, RBSN, RCBTB2, RCC1, RCC1, SNHG3, RCCD1, RECQL, RELL2, REPIN1, AC073111.3, REPIN1, ZNF775, RER1, RERE, RFWD3, RFX3, RGL2, RGMB, RGS11, RGS3, RGS5, AL592435.1, RHBDD1, RHNO1, TULP3, RHOC, AL603832.3, RHOC,RP11-426L16.10, RHOH, RIC8B, RIMKLB, RIN1, RIPK2, RIT1, RLIM, RNASE4,ANG,AL163636.6, RNASEK, RNASEK-C17orf49, RNF111, RNF123, RNF13, RNF14, RNF185, RNF216, RNF24, RNF32, RNF34, RNF38, RNF4, RNF44, RNH1, RNMT, RNPS1, RO60, ROPN1, ROPN1B, ROR2, RP1-102H19.8, C6orf163, RP1-283E3.8,CDK11A, RP11-120M18.2,PRKAR1A, RP11-133K1.2, PAK6, RP11-164J13.1,CAPN3, RP11-21J18.1, ANKRD12, RP11-322E11.6,INO80C, RP11-337C18.10,CHD1L, RP11-432B6.3, TRIM59, RP11-468E2.4,IRF9, RP11-484M3.5,UPK1B, RP11-517H2.6, CCR6, RP11-613M10.9, SLC25A51, RP11-659G9.3, RAB30, RP11-691N7.6,CTNND1, RP11-849H4.2, RP11-896J10.3, NKX2-1, RP11-96O20.4,SQRDL, RP11-986E7.7, SERPINA3, RP4-769N13.6, GPRASPJ, RP4-769N13.6,GPRASP2, RP4-798P15.3, SEC16B, RP5-1021I20.4, ZNF410, RP6-109B7.3, FLJ27365, RPE, RPH3AL, RPL15, RPL17, RPL17-C18orf32,RPL17, RPL23A, RPL36,HSD11B1L, RPP38, RPS20, RPS27A, RPS3A, RPS6KA3, RPS6KC1, RPS6KL1, RPUSD1, RRAGD, RRAS2, RRBP1, RSL1D1, RSRC2, RSRP1, RUBCNL, RUNX1T1, RUVBL2, RWDD1, RWDD4, S100A13,AL162258.1, S100A13,RP1-178F15.5, S100A16, S100A4, S100A3, S100A6, S100PBP, SAA1, SACM1L, SAMD4B, SAR1A, SARAF, SARNP,RP11-76217.5, SCAMP5, SCAP, SCAPER, SCFD1, SCGB3A2, SC1N, SCML1, SCNN1D, SCO2, SCOC, SCRN1, SDC2, SDC4, SEC13, SEC14L1, SEC14L2, SEC22C, SEC23B, SEC24C, SEC61G, SEMA4A, SEMA4C, SEMA4D, SEMA6C, SENP7, SEPP1, 11-Sep, 2-Sep, SERGEF, AC055860.1, SERP1, SERPINA1, SERPINA5, SERPINB6, SERPING1, SERPINH1, SERTAD3, SETD5, SFMBT1, AC096887.1, SFTPA1, SFTPA2, SFXN2, SGCD, SGCE, SGK3, SGK3,C8orf44, SH2B1, SH2D6, SH3BP1,Z83844.3, SH3BP2, SH3BP5, SH3D19, SH3YL1, SHC1, SHISA5, SHMT1, SHMT2, SHOC2, SHROOM1, SIGLEC5,SIGLEC14, SIL1, SIN3A, SIRT2, SIRT6, SKP1, STAT4, AC104109.3, SLAIN1, SLC10A3, SLC12A9, SLC14A1, SLC16A6, SLC1A2, SLC1A6, SLC20A2, SLC25A18, SLC25A19, SLC25A22, SLC25A25, SLC25A29, SLC25A30, SLC25A32, SLC25A39, SLC25A44, SLC25A45, SLC25A53, SLC26A11, SLC26A4, SLC28A1, SLC29A1, SLC2A14, SLC2AS, SLC2A8, SLC35B2, SLC35B3, SLC35C2, SLC37A1, SLC38A1, SLC38A11, SLC39A13, SLC39A14, SLC41A3, SLC44A3, SLC4A7, SLC4A8, SLC5A10, SLC5A11, SLC6A1, SLC6A12, SLC6A9, SLC7A2, SLC7A6, SLC7A7, SLCO1A2, SLCO1C1, SLCO2B1, SLFN11, SLFN12, SLFNL1, SLMO1, SLTM, SLU7, SMAD2, SMAP2, SMARCA2, SMARCE1, AC073508.2, SMARCE1, KRT222, SMC6, SMG7, SMIM22, SMOX, SMPDL3A, SMTN, SMU1, SMUG1, SNAP2S, SNCA, SNRK, SNRPC, SNRPD1, SNRPD2, SNRPN, SNRPN,SNURF, SNUPN, SNX11, SNX16, SNX17, SOAT1, SOHLH2,CCDC169-SOHLH2,CCDC169, SORBS1, SORBS2, SOX5, SP2, SPART, SPATA20, SPATA21, SPATS2, SPATS2L, SPDYE2, SPECC1, SPECC1L,SPECC1L-ADORA2A, SPECC1L-ADORA2A, ADORA2A, SPEG, SPG20, SPG21, SPIDR, SPIN1, SPOCD1, SPOP, SPRR2A, SPRR2B, SPRR2E, SPRR2B, SPRR2F, SPRR2D, SPRR3, SPRY1, SPRY4, SPTBN2, SRC, SRGAP1, SRP68, SRSF11, SSX1, SSX2IP, ST3GAL4, ST3GAL6, ST5, ST6GALNAC6, ST7L, STAC3, STAG1, STAG2, STAMBP, STAMBPL1, STARD3NL, STAT6, STAU1, STAU2, AC022826.2, STAU2, RP11-463D19.2, STEAP2, STEAP3, STIL, STK25, STK33, STK38L, STK40, STMN1, STON1,STON1-GTF2A1L, STRAP, STRBP, STRC, AC011330.5, STRC, CATSPER2, STRC, CATSPER2, AC011330.5, STRC,STRCP1, STT3A, STX16-NPEPL1, NPEPL1, STX5, STX6, STX8, STXBP6, STYK1, SULT1A1, SULT1A2, SUMF2, SUN1, SUN2, SUN2, DNAL4, SUOX, SUPT6H, SUV39H2, SV2B, SYBU, SYNCRIP, SYNJ2, SYT1, SYTL4, TAB2, TACC1, TADA2B, TAF1C, TAF6,AC073842.2, TAF6, RP11-506M12.1, TAF9, TAGLN, TANK, TAPSAR1,PSMB9, TAPT1, TATDN1, TAZ, TBC1D1, TBC1D12, HELLS, TBC1D15, TBC1D3H,TBC1D3G, TBC1D5, TBC1D5,SATB1, TBCA, TBCEL, TBCEL, AP000646.1, TBL1XR1, TBP, TBX5, TBXAS1, TCAF1, TCEA2, TCEAL4, TCEAL8, TCEAL9, TCEANC, TCEB1, TCF19, TCF25, TCF4, TCP1, TCP10L, AP000275.65, TCP11, TCP11L2, TCTN1, TDG, TDP1, TDRD7, TEAD2, TECR, TENC1, TENT4A, TEX264, TEX30, TEX37, TFDP1, TFDP2, TFEB, TFG, TFP1,TF, TFPI, TGIF1, THAP6, THBS3, THOC5, THRAP3, THUMPD3, TIAL1, TIMM, TIMP1, TIRAP, TJAP1, TJP2, TK2, TLDC1, TLE3, TLE6, TLN1, TLR10, TM9SF1, TMBIM1, TMBIM4, TMBIM6, TMC6, TMCC1, TMCO4, TMEM126A, TMEM139, TMEM150B, Th1EM155, TMEM161B, TMEM164, TMEM168, TMEM169, TMEM175, TMEM176B, TMEM182, TMEM199,CTB-96E2.3, TMEM216, TMEM218, TMEM230, TMEM263, TMEM45A, TMEM45B, TMEM62, TMEM63B, TMEM66, TMEM68, TMEM98, TMEM9B, TMPRSS11D, TMPRSS5, TMSB15B, TMTC4, TMUB2, TMX2—CTNND1, RP11-691N7.6,CTNND1, TNFAIP2, TNFAIP8L2, SCNM1, TNFRSF10C, TNFRSFI9, TNFRSF8, TNFSF12-TNFSF13, TNFSF12, TNFSF13, TNFSF12-TNFSF13, TNFSF13, TNIP1, TNK2, TNNT1, TNRC18, TNS3, TOB2, TOM1L1, TOP1MT, TOP3B, TOX2, TP53,RP11-199F11.2, TP53I11, TP53INP2, TPCN1, TPM3P9,AC022137.3, TPT1, TRA2B, TRAF2, TRAF3, TRAPPC12, TRAPPC3, TREH, TREX1, TREX2, TRIB2, TRIM3, TRIM36, TRIM39, TRIM46, TRIM6, TRIM6-TRIM34, TRIM6-TRIM34, TRIM34, TRIM66, TRIM73, TRIT1, TRMT10B, TRMT2B, TRMT2B-AS1, TRNT1, TRO, TROVE2, TRPS1, TRPT1, TSC2, TSGA10, TSPAN14, TSPAN3, TSPAN4, TSPANS, TSPAN6, TSPAN9, TSPO, TTC12, TTC23, TTC3, TTC39A, TTC39C, TTLL1, TTLL7, TTPAL, TUBD1, TWNK, TXNL4A, TXNL4B, TXNRD1, TYK2, U2AF1, UBA2, UBA52, UBAP2, UBE2D2, UBE2D3, UBE2E3, UBE2I, UBE2J2, UBE3A, UBL7, UBXN11, UBXN7, UGDH, UGGT1, UGP2, UMAD1,AC007161.3, UNC45A, UQCC1, URGCP-MRPS24,URGCP, USMG5, USP16, USP21, USP28, USP3, USP33, USP35, USP54, USP9Y, USPL1, UTP15, VARS2, VASH2, VAV3, VDAC1, VDAC2, VDR, VEZT, VGF, VIL1, VILL, VIPR1, VPS29, VPS37C, VPS8, VPS9D1, VRK2, VWA1, VWA5A, WARS, WASF1, WASHC5, WBP5, WDHD1, WDPCP, WDR37, WDR53, WDR6, WDR72, WDR74, WDR81, WDR86, WDYHV1, WFDC3, WHSC1, WIPF1, WSCD2, WWP2, XAGE1A, XAGE1B, XKR9, XPNPEP1, XRCC3, XRN2, XXYLT1, YIF1A, YIF1B, YIPF1, YIPF5, YPEL5, YWHAB, YWHAZ, YY1AP1, ZBTB1, ZBTB14, ZBTB18, ZBTB20, ZBTB21, ZBTB25, ZBTB33, ZBTB34, ZBTB38, ZBTB43, ZBTB49, ZBTB7B, ZBTB7C, ZBTB8OS, ZC3H11A, ZBED6, ZC3H13, ZCCHC17, ZCCHC7, ZDHHC11, ZDHHC13, ZEB2, ZFAND5, ZFAND6, ZFP1, ZFP62, ZFX, ZFYVE16, ZFYVE19, ZFYVE20, ZFYVE27, ZHX2, AC016405.1, ZHX3, ZIK1, ZIM2,PEG3, ZKSCAN1, ZKSCAN3, ZKSCAN8, ZMAT3, ZMAT5, ZMIZ2, ZMYM6, ZMYND11, ZNF10,AC026786.1, ZNF133, ZNF146, ZNF16, ZNF177, ZNF18, ZNF200, ZNF202, ZNF211, ZNF219, ZNF226, ZNF227, ZNF23, AC010547.4, ZNF23, AC010547.9, ZNF239, ZNF248, ZNF25, ZNF253, ZNF254, ZNF254, AC092279.1, ZNF263, ZNF274, ZNF275, ZNF28,ZNF468, ZNF283, ZNF287, ZNF3, ZNF320, ZNF322, ZNF324B, ZNF331, ZNF334, ZNF34, ZNF350, ZNF385A, ZNF395, FBXO16, ZNF415, ZNF418, ZNF43, ZNF433-AS1, AC008770.4, ZNF438, ZNF444, ZNF445, ZNF467, ZNF480, ZNF493, ZNF493,CTD-2561J22.3, ZNF502, ZNF507, ZNF512, AC074091.1, ZNF512,RP11-158I13.2, ZNF512B, ZNF512B, SAMD10, ZNF521, ZNF532, ZNF544, AC020915.5, ZNF544, CTD-3138B18.4, ZNF559,ZNF177, ZNF562, ZNF567, ZNF569, ZNF570, ZNF571-AS1,ZNF540, ZNF577, ZNF580,ZNF581, ZNF580, ZNF581,CCDC106, ZNF600, ZNF611, ZNF613, ZNF615, ZNF619,ZNF620, ZNF639, ZNF652, ZNF665, ZNF667, ZNF668, ZNF671, ZNF682, ZNF687, ZNF691, ZNF696, ZNF701, ZNF706, ZNF707, ZNF714, ZNF717, ZNF718, ZNF720, ZNF721, ZNF730, ZNF763, ZNF780B,AC005614.5, ZNF782, ZNF786, ZNF79, ZNF791, ZNF81, ZNF83, ZNF837, ZNF839, ZNF84, ZNF845, ZNF846, ZNF865, ZNF91, ZNF92, ZNHIT3, ZSCAN21, ZSCAN25, ZSCAN30, and ZSCAN32.

[0461] In some embodiments, the gene encoding a target sequence comprises the HTT gene. In some embodiments, the gene encoding a target sequence comprises the SMN2 gene.

[0462] Exemplary genes that may be modulated by the compounds of Formula (I), (III), or (V) described herein may also include, inter alia, AC005258.1, AC005943.1, AC007849.1, AC008770.2, AC010487.3, AC011477.4, AC012651.1, AC012531.3, AC034102.2, AC073896.4, AC104472.3, AL109811.3, AL133342.1, AL137782.1, AL157871.5, AF241726.2, AL355336.1, AL358113.1, AL360181.3, AL445423.2, AL691482.3, AP001267.5, RF01169, and RF02271.

[0463] The compounds described herein may further be used to modulate a sequence comprising a particular splice site sequence, e.g., an RNA sequence (e.g., a pre-mRNA sequence). In some embodiments, the splice site sequence comprises a 5′ splice site sequence. In some embodiments, the splice site sequence comprises a 3′ splice site sequence. Exemplary gene sequences and splice site sequences (e.g., 5′ splice site sequences) include AAAgcaaguu, AAAguaaaaa, AAAguaaaau, AAAguaaagu, AAAguaaaua, AAAguaaaug, AAAguaaauu, AAAguaacac, AAAguaacca, AAAguaacuu, AAAguaagaa, AAAguaagac, AAAguaagag, AAAguaagau, AAAguaagca, AAAguaagcc, AAAguaagcu, AAAguaagga, AAAguaaggg, AAAguaaggu, AAAguaagua, AAAguaaguc, AAAguaagug, AAAguaaguu, AAAguaaucu, AAAguaauua, AAAguacaaa, AAAguaccgg, AAAguacuag, AAAguacugg, AAAguacuuc, AAAguacuug, AAAguagcuu, AAAguaggag, AAAguaggau, AAAguagggg, AAAguaggua, AAAguaguaa, AAAguauauu, AAAguauccu, AAAguaucuc, AAAguaugga, AAAguaugua, AAAguaugug, AAAguauguu, AAAguauugg, AAAguauuuu, AAAgucagau, AAAgucugag, AAAgugaaua, AAAgugagaa, AAAgugagac, AAAgugagag, AAAgugagau, AAAgugagca, AAAgugagcu, AAAgugaggg, AAAgugagua, AAAgugaguc, AAAgugagug, AAAgugaguu, AAAgugcguc, AAAgugcuga, AAAguggguc, AAAguggguu, AAAgugguaa, AAAguguaug, AAAgugugug, AAAguguguu, AAAguuaagu, AAAguuacuu, AAAguuagug, AAAguuaugu, AAAguugagu, AAAguuugua, AACguaaaac, AACguaaagc, AACguaaagg, AACguaagca, AACguaaggg, AACguaaguc, AACguaagug, AACguaaugg, AACguaguga, AACguaugua, AACguauguu, AACgugagca, AACgugagga, AACgugauuu, AACgugggau, AACgugggua, AACguguguu, AACguuggua, AAGgcaaauu, AAGgcaagag, AAGgcaagau, AAGgcaagcc, AAGgcaagga, AAGgcaaggg, AAGgcaagug, AAGgcaaguu, AAGgcacugc, AAGgcagaaa, AAGgcaggau, AAGgcaggca, AAGgcaggga, AAGgcagggg, AAGgcaggua, AAGgcaggug, AAGgcaucuc, AAGgcaugcu, AAGgcaugga, AAGgcauguu, AAGgcauuau, AAGgcgagcu, AAGgcgaguc, AAGgcgaguu, AAGgcuagcc, AAGguaaaaa, AAGguaaaac, AAGguaaaag, AAGguaaaau, AAGguaaaca, AAGguaaacc, AAGguaaacu, AAGguaaaga, AAGguaaagc, AAGguaaagg, AAGguaaagu, AAGguaaaua, AAGguaaauc, AAGguaaaug, AAGguaaauu, AAGguaacaa, AAGguaacau, AAGguaaccc, AAGguaacua, AAGguaacuc, AAGguaacug, AAGguaacuu, AAGguaagaa, AAGguaagac, AAGguaagag, AAGguaagau, AAGguaagca, AAGguaagcc, AAGguaagcg, AAGguaagcu, AAGguaagga, AAGguaaggc, AAGguaaggg, AAGguaaggu, AAGguaagua, AAGguaaguc, AAGguaagug, AAGguaaguu, AAGguaauaa, AAGguaauac, AAGguaauag, AAGguaauau, AAGguaauca, AAGguaaucc, AAGguaaucu, AAGguaauga, AAGguaaugc, AAGguaaugg, AAGguaaugu, AAGguaauua, AAGguaauuc, AAGguaauug, AAGguaauuu, AAGguacaaa, AAGguacaag, AAGguacaau, AAGguacacc, AAGguacacu, AAGguacagg, AAGguacagu, AAGguacaua, AAGguacaug, AAGguacauu, AAGguaccaa, AAGguaccag, AAGguaccca, AAGguacccu, AAGguaccuc, AAGguaccug, AAGguaccuu, AAGguacgaa, AAGguacggg, AAGguacggu, AAGguacguc, AAGguacguu, AAGguacuaa, AAGguacuau, AAGguacucu, AAGguacuga, AAGguacugc, AAGguacugu, AAGguacuuc, AAGguacuug, AAGguacuuu, AAGguagaaa, AAGguagaac, AAGguagaca, AAGguagacc, AAGguagacu, AAGguagagu, AAGguagaua, AAGguagcaa, AAGguagcag, AAGguagcca, AAGguagccu, AAGguagcua, AAGguagcug, AAGguagcuu, AAGguaggaa, AAGguaggag, AAGguaggau, AAGguaggca, AAGguaggcc, AAGguaggcu, AAGguaggga, AAGguagggc, AAGguagggg, AAGguagggu, AAGguaggua, AAGguagguc, AAGguaggug, AAGguagguu, AAGguaguaa, AAGguaguag, AAGguagucu, AAGguagugc, AAGguagugg, AAGguaguuc, AAGguaguuu, AAGguauaaa, AAGguauaau, AAGguauaca, AAGguauacu, AAGguauaua, AAGguauauc, AAGguauaug, AAGguauauu, AAGguaucac, AAGguaucag, AAGguauccc, AAGguauccu, AAGguaucuc, AAGguaucug, AAGguaucuu, AAGguaugaa, AAGguaugac, AAGguaugag, AAGguaugau, AAGguaugca, AAGguaugcc, AAGguaugcu, AAGguaugga, AAGguauggc, AAGguauggg, AAGguaugua, AAGguauguc, AAGguaugug, AAGguauguu, AAGguauuaa, AAGguauuac, AAGguauuag, AAGguauuau, AAGguauucc, AAGguauuga, AAGguauugu, AAGguauuua, AAGguauuuc, AAGguauuug, AAGguauuuu, AAGgucaaau, AAGgucaaga, AAGgucaagu, AAGgucacag, AAGgucagaa, AAGgucagac, AAGgucagag, AAGgucagca, AAGgucagcc, AAGgucagcg, AAGgucagcu, AAGgucagga, AAGgucaggc, AAGgucaggg, AAGgucaggu, AAGgucagua, AAGgucaguc, AAGgucagug, AAGgucaguu, AAGgucauag, AAGgucaucu, AAGguccaca, AAGguccaga, AAGguccaua, AAGgucccag, AAGgucccuc, AAGguccuuc, AAGgucgagg, AAGgucuaau, AAGgucuacc, AAGgucuaua, AAGgucuccu, AAGgucucug, AAGgucucuu, AAGgucugaa, AAGgucugag, AAGgucugga, AAGgucuggg, AAGgucugua, AAGgucuguu, AAGgucuucu, AAGgucuuuu, AAGgugaaac, AAGgugaaag, AAGgugaaau, AAGgugaacu, AAGgugaagc, AAGgugaagg, AAGgugaagu, AAGgugaaua, AAGgugaaug, AAGgugaauu, AAGgugacaa, AAGgugacag, AAGgugacau, AAGgugacug, AAGgugacuu, AAGgugagaa, AAGgugagac, AAGgugagag, AAGgugagau, AAGgugagca, AAGgugagcc, AAGgugagcg, AAGgugagcu, AAGgugagga, AAGgugaggc, AAGgugaggg, AAGgugaggu, AAGgugagua, AAGgugaguc, AAGgugagug, AAGgugaguu, AAGgugauaa, AAGgugauca, AAGgugaucc, AAGgugauga, AAGgugaugc, AAGgugaugu, AAGgugauua, AAGgugauug, AAGgugauuu, AAGgugcaca, AAGgugcauc, AAGgugcccu, AAGgugccug, AAGgugcgug, AAGgugcguu, AAGgugcucc, AAGgugcuga, AAGgugcugc, AAGgugcugg, AAGgugcuua, AAGgugcuuu, AAGguggaua, AAGguggcua, AAGguggcug, AAGguggcuu, AAGgugggaa, AAGgugggag, AAGgugggau, AAGgugggca, AAGgugggcc, AAGgugggcg, AAGgugggga, AAGguggggu, AAGgugggua, AAGgugggug, AAGguggguu, AAGgugguaa, AAGgugguac, AAGgugguau, AAGguggugg, AAGgugguua, AAGgugguuc, AAGgugguuu, AAGguguaag, AAGgugucaa, AAGgugucag, AAGgugucug, AAGgugugaa, AAGgugugag, AAGgugugca, AAGgugugga, AAGguguggu, AAGgugugua, AAGguguguc, AAGgugugug, AAGguguguu, AAGguguucu, AAGguguugc, AAGguguugg, AAGguguuug, AAGguuaaaa, AAGguuaaca, AAGguuaagc, AAGguuaauu, AAGguuacau, AAGguuagaa, AAGguuagau, AAGguuagca, AAGguuagcc, AAGguuagga, AAGguuaggc, AAGguuagua, AAGguuaguc, AAGguuagug, AAGguuaguu, AAGguuauag, AAGguuauga, AAGguucaaa, AAGguucaag, AAGguuccuu, AAGguucggc, AAGguucguu, AAGguucuaa, AAGguucuga, AAGguucuua, AAGguugaau, AAGguugacu, AAGguugagg, AAGguugagu, AAGguugaua, AAGguugcac, AAGguugcug, AAGguuggaa, AAGguuggca, AAGguuggga, AAGguugggg, AAGguuggua, AAGguugguc, AAGguuggug, AAGguugguu, AAGguuguaa, AAGguugucc, AAGguugugc, AAGguuguua, AAGguuuacc, AAGguuuaua, AAGguuuauu, AAGguuuccu, AAGguuucgu, AAGguuugag, AAGguuugca, AAGguuugcc, AAGguuugcu, AAGguuugga, AAGguuuggu, AAGguuugua, AAGguuuguc, AAGguuugug, AAGguuuuaa, AAGguuuuca, AAGguuuucg, AAGguuuugc, AAGguuuugu, AAGguuuuuu, AAUgcaagua, AAUgcaaguc, AAUguaaaca, AAUguaaaua, AAUguaaauc, AAUguaaaug, AAUguaaauu, AAUguaacua, AAUguaagaa, AAUguaagag, AAUguaagau, AAUguaagcc, AAUguaagcu, AAUguaagga, AAUguaagua, AAUguaaguc, AAUguaagug, AAUguaaguu, AAUguaauca, AAUguaauga, AAUguaaugu, AAUguacauc, AAUguacaug, AAUguacgau, AAUguacgua, AAUguacguc, AAUguacgug, AAUguacucu, AAUguaggca, AAUguagguu, AAUguaucua, AAUguaugaa, AAUguaugua, AAUguaugug, AAUguauguu, AAUgucagag, AAUgucagau, AAUgucagcu, AAUgucagua, AAUgucaguc, AAUgucagug, AAUgucaguu, AAUgucggua, AAUgucuguu, AAUgugagaa, AAUgugagca, AAUgugagcc, AAUgugagga, AAUgugagua, AAUgugaguc, AAUgugagug, AAUgugaguu, AAUgugauau, AAUgugcaua, AAUgugcgua, AAUgugcguc, AAUgugggac, AAUguggguc, AAUgugggug, AAUgugguuu, AAUgugugua, AAUguuaagu, AAUguuagaa, AAUguuagau, AAUguuagua, AAUguuggug, ACAgcaagua, ACAguaaaua, ACAguaaaug, ACAguaagaa, ACAguaagca, ACAguaagua, ACAguaaguc, ACAguaagug, ACAguaaguu, ACAguacgua, ACAguaggug, ACAguauaac, ACAguaugua, ACAgucaguu, ACAgugagaa, ACAgugagcc, ACAgugagcu, ACAgugagga, ACAgugaggu, ACAgugagua, ACAgugaguc, ACAgugagug, ACAgugaguu, ACAgugggua, ACAguggguu, ACAguguaaa, ACAguuaagc, ACAguuaagu, ACAguuaugu, ACAguugagu, ACAguuguga, ACCguaagua, ACCgugagaa, ACCgugagca, ACCgugaguu, ACCgugggug, ACGguaaaac, ACGguaacua, ACGguaagua, ACGguaagug, ACGguaaguu, ACGguaauua, ACGguaauuu, ACGguacaau, ACGguacagu, ACGguaccag, ACGguacggu, ACGguacgua, ACGguaggaa, ACGguaggag, ACGguaggug, ACGguaguaa, ACGguauaau, ACGguaugac, ACGguaugcg, ACGguaugua, ACGguauguc, ACGgugaaac, ACGgugaagu, ACGgugaauc, ACGgugacag, ACGgugacca, ACGgugagaa, ACGgugagau, ACGgugagcc, ACGgugagua, ACGgugagug, ACGgugaguu, ACGgugcgug, ACGguggcac, ACGguggggc, ACGgugggug, ACGguguagu, ACGgugucac, ACGgugugua, ACGguguguu, ACGguuagug, ACGguuaguu, ACGguucaau, ACUguaaaua, ACUguaagaa, ACUguaagac, ACUguaagca, ACUguaagcu, ACUguaagua, ACUguaaguc, ACUguaaguu, ACUguacguu, ACUguacugc, ACUguaggcu, ACUguaggua, ACUguauauu, ACUguaugaa, ACUguaugcu, ACUguaugug, ACUguauucc, ACUgucagcu, ACUgucagug, ACUgugaacg, ACUgugagca, ACUgugagcg, ACUgugagcu, ACUgugagua, ACUgugaguc, ACUgugagug, ACUgugaguu, ACUgugggua, ACUgugugug, ACUguuaagu, AGAgcaagua, AGAguaaaac, AGAguaaacg, AGAguaaaga, AGAguaaagu, AGAguaaauc, AGAguaaaug, AGAguaacau, AGAguaacua, AGAguaagaa, AGAguaagac, AGAguaagag, AGAguaagau, AGAguaagca, AGAguaagcu, AGAguaagga, AGAguaaggc, AGAguaaggg, AGAguaaggu, AGAguaaguc, AGAguaagug, AGAguaaguu, AGAguaauaa, AGAguaaugu, AGAguaauuc, AGAguaauuu, AGAguacacc, AGAguaccug, AGAguacgug, AGAguacucu, AGAguacuga, AGAguacuuu, AGAguagcug, AGAguaggaa, AGAguaggga, AGAguagggu, AGAguagguc, AGAguaggug, AGAguagguu, AGAguauaua, AGAguauauu, AGAguaugaa, AGAguaugac, AGAguaugau, AGAguauguc, AGAguaugug, AGAguauguu, AGAguauuaa, AGAguauuau, AGAgucagug, AGAgugagac, AGAgugagag, AGAgugagau, AGAgugagca, AGAgugagua, AGAgugaguc, AGAgugagug, AGAgugaguu, AGAgugcguc, AGAgugggga, AGAgugggug, AGAgugugug, AGAguguuuc, AGAguuagua, AGAguugaga, AGAguugagu, AGAguugguu, AGAguuugau, AGCguaagcu, AGCguaagug, AGCgugagcc, AGCgugagug, AGCguuguuc, AGGgcagagu, AGGgcagccu, AGGgcuagua, AGGguaaaga, AGGguaaaua, AGGguaaauc, AGGguaaauu, AGGguaacca, AGGguaacug, AGGguaacuu, AGGguaagaa, AGGguaagag, AGGguaagau, AGGguaagca, AGGguaagga, AGGguaaggc, AGGguaaggg, AGGguaagua, AGGguaaguc, AGGguaagug, AGGguaaguu, AGGguaauac, AGGguaauga, AGGguaauua, AGGguaauuu, AGGguacacc, AGGguacagu, AGGguacggu, AGGguaggac, AGGguaggag, AGGguaggca, AGGguaggcc, AGGguaggga, AGGguagggu, AGGguagguc, AGGguaggug, AGGguagguu, AGGguauaua, AGGguaugac, AGGguaugag, AGGguaugau, AGGguaugca, AGGguaugcu, AGGguauggg, AGGguauggu, AGGguaugua, AGGguauguc, AGGguaugug, AGGguauuac, AGGguauucu, AGGguauuuc, AGGgucagag, AGGgucagca, AGGgucagga, AGGgucaggg, AGGgucagug, AGGgucaguu, AGGguccccu, AGGgucggga, AGGgucugca, AGGgucuguu, AGGgugaaga, AGGgugacua, AGGgugagaa, AGGgugagac, AGGgugagag, AGGgugagca, AGGgugagcc, AGGgugagcu, AGGgugagga, AGGgugaggg, AGGgugaggu, AGGgugagua, AGGgugaguc, AGGgugagug, AGGgugaguu, AGGgugggga, AGGguggggu, AGGgugggua, AGGgugggug, AGGgugugua, AGGgugugug, AGGguuaaug, AGGguuagaa, AGGguuaguu, AGGguuggug, AGGguuugug, AGGguuuguu, AGUguaaaag, AGUguaaaua, AGUguaaauu, AGUguaagaa, AGUguaagag, AGUguaagau, AGUguaagca, AGUguaagcc, AGUguaagua, AGUguaagug, AGUguaaguu, AGUguaauug, AGUguaggac, AGUguagguc, AGUguaugag, AGUguaugua, AGUguauguu, AGUguauugu, AGUguauuua, AGUgucaguc, AGUgugagag, AGUgugagca, AGUgugagcc, AGUgugagcu, AGUgugagua, AGUgugaguc, AGUgugagug, AGUgugaguu, AGUgugggua, AGUgugggug, AGUgugugua, AGUguuccua, AGUguugggg, AGUguuucag, AUAguaaaua, AUAguaagac, AUAguaagau, AUAguaagca, AUAguaagua, AUAguaagug, AUAguaaguu, AUAguaggua, AUAguauguu, AUAgucucac, AUAgugagac, AUAgugagag, AUAgugagau, AUAgugagcc, AUAgugaggc, AUAgugagua, AUAgugaguc, AUAgugagug, AUAgugcguc, AUAgugugua, AUAguucagu, AUCguaagcc, AUCguaaguu, AUCguauucc, AUCgugagua, AUGgcaagcg, AUGgcaagga, AUGgcaaguu, AUGgcaggua, AUGgcaugug, AUGgcgccau, AUGgcuugug, AUGguaaaac, AUGguaaaau, AUGguaaacc, AUGguaaaga, AUGguaaaua, AUGguaaaug, AUGguaaauu, AUGguaacag, AUGguaacau, AUGguaacua, AUGguaacuc, AUGguaacuu, AUGguaagaa, AUGguaagac, AUGguaagag, AUGguaagau, AUGguaagca, AUGguaagcc, AUGguaagcu, AUGguaagga, AUGguaaggg, AUGguaagua, AUGguaaguc, AUGguaagug, AUGguaaguu, AUGguaauaa, AUGguaauau, AUGguaauga, AUGguaaugg, AUGguaauug, AUGguaauuu, AUGguacagc, AUGguacauc, AUGguaccag, AUGguaccug, AUGguacgag, AUGguacggu, AUGguagauc, AUGguagcag, AUGguagcug, AUGguaggaa, AUGguaggau, AUGguaggca, AUGguaggcu, AUGguagggg, AUGguagggu, AUGguaggua, AUGguaggug, AUGguaguuu, AUGguauagu, AUGguauaua, AUGguaucag, AUGguaucuu, AUGguaugau, AUGguaugca, AUGguaugcc, AUGguaugcg, AUGguaugcu, AUGguaugga, AUGguauggc, AUGguaugug, AUGguauguu, AUGguauuau, AUGguauuga, AUGguauuug, AUGgucaggg, AUGgucaguc, AUGgucagug, AUGgucauuu, AUGgugaaaa, AUGgugaaac, AUGgugaaau, AUGgugaacu, AUGgugaaga, AUGgugacgu, AUGgugagaa, AUGgugagac, AUGgugagag, AUGgugagca, AUGgugagcc, AUGgugagcg, AUGgugagcu, AUGgugaggc, AUGgugaggg, AUGgugagua, AUGgugaguc, AUGgugagug, AUGgugaguu, AUGgugauuu, AUGgugcgau, AUGgugcgug, AUGgugggua, AUGgugggug, AUGguggguu, AUGgugguua, AUGguguaag, AUGgugugaa, AUGgugugua, AUGgugugug, AUGguuacuc, AUGguuagca, AUGguuaguc, AUGguuagug, AUGguuaguu, AUGguucagu, AUGguucguc, AUGguuggua, AUGguugguc, AUGguugguu, AUGguuguuu, AUGguuugca, AUGguuugua, AUUgcaagua, AUUguaaaua, AUUguaagau, AUUguaagca, AUUguaagga, AUUguaaggc, AUUguaagua, AUUguaaguc, AUUguaaguu, AUUguaauua, AUUguaauuu, AUUguacaaa, AUUguaccuc, AUUguacgug, AUUguacuug, AUUguaggua, AUUguaugag, AUUguaugua, AUUgucuguu, AUUgugagcu, AUUgugagua, AUUgugaguc, AUUgugaguu, AUUgugcgug, AUUgugggug, AUUguuagug, CAAguaaaaa, CAAguaaaua, CAAguaaauc, CAAguaaaug, CAAguaaccc, CAAguaacua, CAAguaacug, CAAguaagaa, CAAguaagac, CAAguaagau, CAAguaaggu, CAAguaagua, CAAguaaguc, CAAguaagug, CAAguaaguu, CAAguaaucc, CAAguaaucu, CAAguaauua, CAAguaauuc, CAAguaauug, CAAguaauuu, CAAguacaca, CAAguacguu, CAAguacuuu, CAAguagcug, CAAguaggau, CAAguaggua, CAAguagguc, CAAguaggug, CAAguagguu, CAAguaguuu, CAAguauaac, CAAguauaug, CAAguaucuu, CAAguaugag, CAAguaugua, CAAguauguc, CAAguaugug, CAAguauguu, CAAguauuga, CAAguauuuc, CAAgucagac, CAAgucagua, CAAgucuaua, CAAgucugau, CAAgugacuu, CAAgugagaa, CAAgugagac, CAAgugagca, CAAgugaggc, CAAgugaggg, CAAgugagua, CAAgugaguc, CAAgugagug, CAAgugaucc, CAAgugaucu, CAAgugauuc, CAAgugauug, CAAgugauuu, CAAgugccuu, CAAgugggua, CAAguggguc, CAAgugggug, CAAgugugag, CAAguuaaaa, CAAguuaagu, CAAguuaauc, CAAguuagaa, CAAguuaguu, CAAguucaag, CAAguuccgu, CAAguuggua, CAAguuuagu, CAAguuucca, CAAguuuguu, CACguaagag, CACguaagca, CACguaauug, CACguaggac, CACguaucga, CACgucaguu, CACgugagcu, CACgugaguc, CACgugagug, CAGgcaagaa, CAGgcaagac, CAGgcaagag, CAGgcaagga, CAGgcaagua, CAGgcaagug, CAGgcaaguu, CAGgcacgca, CAGgcagagg, CAGgcaggug, CAGgcaucau, CAGgcaugaa, CAGgcaugag, CAGgcaugca, CAGgcaugcg, CAGgcaugug, CAGgcgagag, CAGgcgccug, CAGgcgugug, CAGguaaaaa, CAGguaaaag, CAGguaaaca, CAGguaaacc, CAGguaaaga, CAGguaaagc, CAGguaaagu, CAGguaaaua, CAGguaaauc, CAGguaaaug, CAGguaaauu, CAGguaacag, CAGguaacau, CAGguaacca, CAGguaaccg, CAGguaacgu, CAGguaacua, CAGguaacuc, CAGguaacug, CAGguaacuu, CAGguaagaa, CAGguaagac, CAGguaagag, CAGguaagau, CAGguaagcc, CAGguaagga, CAGguaaggc, CAGguaaggg, CAGguaaggu, CAGguaagua, CAGguaagug, CAGguaaguu, CAGguaauaa, CAGguaauau, CAGguaaucc, CAGguaaugc, CAGguaaugg, CAGguaaugu, CAGguaauua, CAGguaauuc, CAGguaauug, CAGguaauuu, CAGguacaaa, CAGguacaag, CAGguacaau, CAGguacaca, CAGguacacg, CAGguacaga, CAGguacagg, CAGguacagu, CAGguacaua, CAGguacaug, CAGguacauu, CAGguaccac, CAGguaccca, CAGguacccg, CAGguacccu, CAGguaccgc, CAGguaccgg, CAGguaccuc, CAGguaccug, CAGguaccuu, CAGguacgag, CAGguacgca, CAGguacgcc, CAGguacggu, CAGguacgua, CAGguacgug, CAGguacuaa, CAGguacuag, CAGguacuau, CAGguacucc, CAGguacucu, CAGguacuga, CAGguacugc, CAGguacugu, CAGguacuua, CAGguacuuu, CAGguagaaa, CAGguagaac, CAGguagaag, CAGguagaca, CAGguagacc, CAGguagaga, CAGguagauu, CAGguagcaa, CAGguagcac, CAGguagcag, CAGguagcca, CAGguagcgu, CAGguagcua, CAGguagcuc, CAGguagcug, CAGguagcuu, CAGguaggaa, CAGguaggac, CAGguaggag, CAGguaggca, CAGguaggga, CAGguagggc, CAGguagggg, CAGguagggu, CAGguaggua, CAGguagguc, CAGguaggug, CAGguagguu, CAGguaguaa, CAGguaguau, CAGguaguca, CAGguagucc, CAGguaguga, CAGguagugu, CAGguaguuc, CAGguaguug, CAGguaguuu, CAGguauaag, CAGguauaca, CAGguauaga, CAGguauauc, CAGguauaug, CAGguauauu, CAGguaucag, CAGguaucau, CAGguauccu, CAGguaucga, CAGguaucgc, CAGguaucua, CAGguaucug, CAGguaucuu, CAGguaugaa, CAGguaugac, CAGguaugag, CAGguaugau, CAGguaugca, CAGguaugcc, CAGguaugcg, CAGguaugcu, CAGguaugga, CAGguauggg, CAGguauggu, CAGguaugua, CAGguauguc, CAGguaugug, CAGguauguu, CAGguauuau, CAGguauuca, CAGguauucu, CAGguauuga, CAGguauugg, CAGguauugu, CAGguauuua, CAGguauuuc, CAGguauuug, CAGguauuuu, CAGgucaaca, CAGgucaaug, CAGgucacgu, CAGgucagaa, CAGgucagac, CAGgucagca, CAGgucagcc, CAGgucagcg, CAGgucagga, CAGgucagua, CAGgucaguc, CAGgucagug, CAGgucaguu, CAGgucaucc, CAGgucaugc, CAGgucauua, CAGgucauuu, CAGguccacc, CAGguccacu, CAGguccagu, CAGguccauc, CAGguccauu, CAGgucccag, CAGgucccug, CAGguccuga, CAGguccugc, CAGguccugg, CAGgucggcc, CAGgucggug, CAGgucguug, CAGgucucuc, CAGgucucuu, CAGgucugag, CAGgucugcc, CAGgucugcg, CAGgucugga, CAGgucuggu, CAGgucugua, CAGgucuguc, CAGgucugug, CAGgucuguu, CAGgucuucc, CAGgucuuuc, CAGgugaaag, CAGgugaaau, CAGgugaaca, CAGgugaaga, CAGgugaagg, CAGgugaaua, CAGgugaauc, CAGgugaauu, CAGgugacaa, CAGgugacau, CAGgugacca, CAGgugaccc, CAGgugaccg, CAGgugaccu, CAGgugacgg, CAGgugacua, CAGgugacuc, CAGgugacug, CAGgugagaa, CAGgugagac, CAGgugagag, CAGgugagau, CAGgugagca, CAGgugagcc, CAGgugagcg, CAGgugagcu, CAGgugagga, CAGgugaggc, CAGgugaggg, CAGgugaggu, CAGgugagua, CAGgugaguc, CAGgugagug, CAGgugaguu, CAGgugauaa, CAGgugaucc, CAGgugaucu, CAGgugaugc, CAGgugaugg, CAGgugaugu, CAGgugauua, CAGgugauuc, CAGgugauug, CAGgugauuu, CAGgugcaaa, CAGgugcaag, CAGgugcaca, CAGgugcacg, CAGgugcaga, CAGgugcagg, CAGgugcaua, CAGgugcauc, CAGgugcaug, CAGgugccaa, CAGgugccca, CAGgugcccc, CAGgugcccg, CAGgugccua, CAGgugccug, CAGgugcgaa, CAGgugcgca, CAGgugcgcc, CAGgugcgcg, CAGgugcgga, CAGgugcggu, CAGgugcgua, CAGgugcguc, CAGgugcgug, CAGgugcuag, CAGgugcuau, CAGgugcuca, CAGgugcucc, CAGgugcucg, CAGgugcugc, CAGgugcugg, CAGgugcuua, CAGgugcuuc, CAGgugcuug, CAGguggaac, CAGguggaag, CAGguggaau, CAGguggaga, CAGguggagu, CAGguggauu, CAGguggcca, CAGguggcuc, CAGguggcug, CAGgugggaa, CAGgugggac, CAGgugggag, CAGgugggau, CAGgugggca, CAGgugggcc, CAGgugggcu, CAGgugggga, CAGguggggc, CAGguggggg, CAGguggggu, CAGgugggua, CAGguggguc, CAGgugggug, CAGguggguu, CAGguggucu, CAGguggugg, CAGgugguug, CAGguguaca, CAGguguagg, CAGguguauc, CAGgugucac, CAGgugucag, CAGgugucca, CAGguguccu, CAGgugucua, CAGgugucuc, CAGgugucug, CAGgugugaa, CAGgugugac, CAGgugugag, CAGgugugau, CAGgugugca, CAGgugugcc, CAGgugugcg, CAGgugugcu, CAGgugugga, CAGguguggc, CAGgugugua, CAGguguguc, CAGgugugug, CAGguguguu, CAGguguuua, CAGguuaaaa, CAGguuaaua, CAGguuaauc, CAGguuaccu, CAGguuagaa, CAGguuagag, CAGguuagau, CAGguuagcc, CAGguuaggg, CAGguuaggu, CAGguuagua, CAGguuaguc, CAGguuagug, CAGguuaguu, CAGguuauca, CAGguuaugu, CAGguuauua, CAGguuauug, CAGguucaaa, CAGguucaac, CAGguucaag, CAGguucaca, CAGguucacg, CAGguucagg, CAGguucaug, CAGguuccag, CAGguuccca, CAGguucccg, CAGguucgaa, CAGguucgag, CAGguucuau, CAGguucugc, CAGguucuua, CAGguucuuc, CAGguucuuu, CAGguugaac, CAGguugaag, CAGguugagu, CAGguugaua, CAGguuggag, CAGguuggca, CAGguuggcc, CAGguugguc, CAGguuggug, CAGguugguu, CAGguuguaa, CAGguuguac, CAGguuguau, CAGguuguca, CAGguuguga, CAGguuguug, CAGguuuaag, CAGguuuacc, CAGguuuagc, CAGguuuagu, CAGguuucuu, CAGguuugaa, CAGguuugag, CAGguuugau, CAGguuugcc, CAGguuugcu, CAGguuuggg, CAGguuuggu, CAGguuugua, CAGguuugug, CAGguuuguu, CAGguuuucu, CAGguuuugg, CAGguuuuuc, CAGguuuuuu, CAUgcagguu, CAUguaaaac, CAUguaacua, CAUguaagaa, CAUguaagag, CAUguaagau, CAUguaagcc, CAUguaagua, CAUguaagug, CAUguaaguu, CAUguaauua, CAUguacaua, CAUguaccac, CAUguacguu, CAUguaggua, CAUguaggug, CAUguagguu, CAUguaugaa, CAUguaugua, CAUguaugug, CAUguauguu, CAUgugagaa, CAUgugagca, CAUgugagcu, CAUgugagua, CAUgugaguc, CAUgugagug, CAUgugaguu, CAUgugcgua, CAUgugggaa, CAUguggguu, CAUgugugug, CAUguguguu, CAUguuaaua, CAUguuagcc, CCAguaagau, CCAguaagca, CCAguaagcc, CCAguaagcu, CCAguaagga, CCAguaagua, CCAguaaguc, CCAguaagug, CCAguaaguu, CCAguaauug, CCAguacggg, CCAguagguc, CCAguauugu, CCAgugaggc, CCAgugagua, CCAgugagug, CCAguggguc, CCAguuaguu, CCAguugagu, CCCguaagau, CCCguauguc, CCCguauguu, CCCguccugc, CCCgugagug, CCGguaaaga, CCGguaagau, CCGguaagcc, CCGguaagga, CCGguaaggc, CCGguaaugg, CCGguacagu, CCGguacuga, CCGguauucc, CCGgucagug, CCGgugaaaa, CCGgugagaa, CCGgugaggg, CCGgugagug, CCGgugaguu, CCGgugcgcg, CCGgugggcg, CCGguugguc, CCUguaaaug, CCUguaaauu, CCUguaagaa, CCUguaagac, CCUguaagag, CCUguaagca, CCUguaagcg, CCUguaagga, CCUguaaguu, CCUguaggua, CCUguaggug, CCUguaucuu, CCUguauggu, CCUguaugug, CCUgugagaa, CCUgugagca, CCUgugaggg, CCUgugaguc, CCUgugagug, CCUgugaguu, CCUguggcuc, CCUgugggua, CCUgugugua, CCUguuagaa, CGAguaaggg, CGAguaaggu, CGAguagcug, CGAguaggug, CGAguagguu, CGAgugagca, CGCguaagag, CGGgcaggca, CGGguaagcc, CGGguaagcu, CGGguaaguu, CGGguaauuc, CGGguaauuu, CGGguacagu, CGGguacggg, CGGguaggag, CGGguaggcc, CGGguaggug, CGGguauuua, CGGgucugag, CGGgugaccg, CGGgugacuc, CGGgugagaa, CGGgugaggg, CGGgugaggu, CGGgugagua, CGGgugagug, CGGgugaguu, CGGgugauuu, CGGgugccuu, CGGgugggag, CGGgugggug, CGGguggguu, CGGguguguc, CGGgugugug, CGGguguguu, CGGguucaag, CGGguucaug, CGGguuugcu, CGUguagggu, CGUguaugca, CGUguaugua, CGUgucugua, CGUgugagug, CGUguuuucu, CUAguaaaug, CUAguaagcg, CUAguaagcu, CUAguaagua, CUAguaaguc, CUAguaagug, CUAguaaguu, CUAguaauuu, CUAguaggua, CUAguagguu, CUAguaugua, CUAguauguu, CUAgugagua, CUCguaagca, CUCguaagug, CUCguaaguu, CUCguaucug, CUCgucugug, CUCgugaaua, CUCgugagua, CUCgugauua, CUGguaaaaa, CUGguaaaau, CUGguaaacc, CUGguaaacg, CUGguaaagc, CUGguaaaua, CUGguaaauc, CUGguaaaug, CUGguaaauu, CUGguaacac, CUGguaacag, CUGguaaccc, CUGguaaccg, CUGguaacug, CUGguaacuu, CUGguaagaa, CUGguaagag, CUGguaagau, CUGguaagca, CUGguaagcc, CUGguaagcu, CUGguaagga, CUGguaaggc, CUGguaaggg, CUGguaaggu, CUGguaagua, CUGguaagug, CUGguaaguu, CUGguaauga, CUGguaaugc, CUGguaauuc, CUGguaauuu, CUGguacaac, CUGguacaau, CUGguacaga, CUGguacaua, CUGguacauu, CUGguaccau, CUGguacguu, CUGguacuaa, CUGguacuug, CUGguacuuu, CUGguagaga, CUGguagaua, CUGguagcgu, CUGguaggau, CUGguaggca, CUGguaggua, CUGguagguc, CUGguaggug, CUGguaucaa, CUGguaugau, CUGguauggc, CUGguauggu, CUGguaugua, CUGguaugug, CUGguauguu, CUGguauuga, CUGguauuuc, CUGguauuuu, CUGgucaaca, CUGgucagag, CUGgucccgc, CUGgucggua, CUGgucuggg, CUGgugaagu, CUGgugaaua, CUGgugaauu, CUGgugacua, CUGgugagaa, CUGgugagac, CUGgugagca, CUGgugagcu, CUGgugagga, CUGgugaggc, CUGgugaggg, CUGgugaggu, CUGgugagua, CUGgugaguc, CUGgugagug, CUGgugaguu, CUGgugauua, CUGgugauuu, CUGgugcaga, CUGgugcgcu, CUGgugcgug, CUGgugcuga, CUGgugggag, CUGgugggga, CUGgugggua, CUGguggguc, CUGgugggug, CUGguggguu, CUGgugugaa, CUGgugugca, CUGgugugcu, CUGguguggu, CUGgugugug, CUGguguguu, CUGguuagcu, CUGguuagug, CUGguucgug, CUGguuggcu, CUGguuguuu, CUGguuugua, CUGguuuguc, CUGguuugug, CUUguaaaug, CUUguaagcu, CUUguaagga, CUUguaaggc, CUUguaagua, CUUguaagug, CUUguaaguu, CUUguacguc, CUUguacgug, CUUguaggua, CUUguagugc, CUUguauagg, CUUgucagua, CUUgugagua, CUUgugaguc, CUUgugaguu, CUUguggguu, CUUgugugua, CUUguuagug, CUUguuugag, GAAguaaaac, GAAguaaagc, GAAguaaagu, GAAguaaaua, GAAguaaauu, GAAguaagaa, GAAguaagcc, GAAguaagcu, GAAguaagga, GAAguaagua, GAAguaagug, GAAguaaguu, GAAguaauau, GAAguaaugc, GAAguaauua, GAAguaauuu, GAAguaccau, GAAguacgua, GAAguacguc, GAAguaggca, GAAguagguc, GAAguauaaa, GAAguaugcu, GAAguaugug, GAAguauguu, GAAguauuaa, GAAgucagug, GAAgugagag, GAAgugagcg, GAAgugaggu, GAAgugaguc, GAAgugagug, GAAgugaguu, GAAgugauaa, GAAgugauuc, GAAgugcgug, GAAguguggg, GAAguguguc, GAAguuggug, GACguaaagu, GACguaagcu, GACguaagua, GACguaaugg, GACguaugcc, GACguauguu, GACgugagcc, GACgugagug, GAGgcaaaug, GAGgcaagag, GAGgcaagua, GAGgcaagug, GAGgcaaguu, GAGgcacgag, GAGgcaggga, GAGgcaugug, GAGgcgaagg, GAGguaaaaa, GAGguaaaac, GAGguaaaag, GAGguaaaau, GAGguaaacc, GAGguaaaga, GAGguaaagc, GAGguaaagu, GAGguaaaua, GAGguaaauc, GAGguaaaug, GAGguaaauu, GAGguaacaa, GAGguaacag, GAGguaacca, GAGguaaccu, GAGguaacuu, GAGguaagaa, GAGguaagag, GAGguaagau, GAGguaagca, GAGguaagcc, GAGguaagcg, GAGguaagcu, GAGguaagga, GAGguaaggc, GAGguaaggg, GAGguaaggu, GAGguaagua, GAGguaaguc, GAGguaauaa, GAGguaauac, GAGguaauau, GAGguaauca, GAGguaaucu, GAGguaaugg, GAGguaaugu, GAGguaauug, GAGguaauuu, GAGguacaaa, GAGguacaac, GAGguacaga, GAGguacagc, GAGguacagu, GAGguacaua, GAGguacauu, GAGguaccag, GAGguaccga, GAGguaccug, GAGguaccuu, GAGguacuag, GAGguacuau, GAGguacucc, GAGguacugc, GAGguacugg, GAGguacugu, GAGguacuug, GAGguacuuu, GAGguagaag, GAGguagaga, GAGguagagg, GAGguagagu, GAGguagauc, GAGguagcua, GAGguagcug, GAGguaggaa, GAGguaggag, GAGguaggca, GAGguaggcu, GAGguaggga, GAGguagggc, GAGguagggg, GAGguaggua, GAGguaggug, GAGguagguu, GAGguaguaa, GAGguaguag, GAGguaguau, GAGguagucu, GAGguagugc, GAGguagugg, GAGguaguua, GAGguaguug, GAGguauaag, GAGguauacu, GAGguauagc, GAGguauaug, GAGguauauu, GAGguaucau, GAGguaucug, GAGguaucuu, GAGguaugaa, GAGguaugac, GAGguaugag, GAGguaugcc, GAGguaugcg, GAGguaugcu, GAGguaugga, GAGguauggg, GAGguauggu, GAGguaugua, GAGguauguc, GAGguaugug, GAGguauguu, GAGguauucc, GAGguauuga, GAGguauugu, GAGguauuua, GAGguauuuc, GAGguauuug, GAGguauuuu, GAGgucaaca, GAGgucaagg, GAGgucaaug, GAGgucacug, GAGgucagaa, GAGgucagag, GAGgucagcu, GAGgucagga, GAGgucaggc, GAGgucaggg, GAGgucaggu, GAGgucagua, GAGgucauau, GAGgucaugu, GAGgucauuu, GAGguccaua, GAGguccauc, GAGguccggg, GAGguccggu, GAGguccuug, GAGgucgggg, GAGgucucgu, GAGgucugag, GAGgucuggu, GAGgucuguc, GAGgucuguu, GAGgucuuuu, GAGgugaaaa, GAGgugaaau, GAGgugaaca, GAGgugaagg, GAGgugaaua, GAGgugaauu, GAGgugacau, GAGgugacca, GAGgugaccu, GAGgugacua, GAGgugacuu, GAGgugagaa, GAGgugagac, GAGgugagag, GAGgugagau, GAGgugagca, GAGgugagcc, GAGgugagcg, GAGgugagcu, GAGgugagga, GAGgugaggc, GAGgugaggg, GAGgugagua, GAGgugagug, GAGgugaguu, GAGgugauau, GAGgugaucc, GAGgugaucu, GAGgugauga, GAGgugaugg, GAGgugaugu, GAGgugauuc, GAGgugcaca, GAGgugcaga, GAGgugcagc, GAGgugcagg, GAGgugccag, GAGgugccca, GAGgugccuu, GAGgugcggg, GAGgugcgug, GAGgugcucc, GAGgugcugg, GAGgugcuua, GAGgugcuug, GAGguggaaa, GAGguggaau, GAGguggacc, GAGguggacg, GAGguggagg, GAGguggcug, GAGgugggaa, GAGgugggag, GAGgugggau, GAGgugggca, GAGgugggcg, GAGgugggcu, GAGgugggga, GAGguggggc, GAGguggggg, GAGgugggua, GAGguggguc, GAGgugggug, GAGguggguu, GAGgugguau, GAGgugguuc, GAGgugucau, GAGgugugag, GAGgugugau, GAGgugugca, GAGgugugcu, GAGgugugga, GAGguguggg, GAGguguggu, GAGgugugua, GAGgugugug, GAGguuaaau, GAGguuaaga, GAGguuaaua, GAGguuaccg, GAGguuagaa, GAGguuagac, GAGguuagag, GAGguuaggu, GAGguuagua, GAGguuaguc, GAGguuagug, GAGguuaguu, GAGguuaugu, GAGguuauuc, GAGguucaaa, GAGguucaua, GAGguucuga, GAGguugaag, GAGguugcag, GAGguugcug, GAGguuggaa, GAGguuggag, GAGguuggau, GAGguuggua, GAGguugguc, GAGguugguu, GAGguuguag, GAGguuucug, GAGguuugag, GAGguuugga, GAGguuuggg, GAGguuugua, GAGguuuguu, GAGguuuuca, GAGguuuuga, GAGguuuugg, GAGguuuuua, GAGguuuuuc, GAUguaaaau, GAUguaagca, GAUguaagcc, GAUguaaggu, GAUguaagua, GAUguaagug, GAUguaaguu, GAUguacauc, GAUguaggua, GAUguauggc, GAUguaugua, GAUguauguu, GAUgucagug, GAUgugagag, GAUgugagcc, GAUgugagcu, GAUgugagga, GAUgugaguc, GAUgugagug, GAUgugaguu, GAUgugggua, GAUgugggug, GAUguguguu, GAUguuagcu, GAUguucagu, GAUguucgug, GAUguuuguu, GCAguaaagg, GCAguaagaa, GCAguaagga, GCAguaagua, GCAguaaguc, GCAguaaguu, GCAguagaug, GCAguaggua, GCAguaugug, GCAguauguu, GCAgucagua, GCAgucagug, GCAguccggu, GCAgugacuu, GCAgugagcc, GCAgugagcg, GCAgugagcu, GCAgugagua, GCAgugagug, GCAgugaguu, GCAgugggua, GCAguuaagu, GCAguugagu, GCCguaaguc, GCCgugagua, GCGguaaagc, GCGguaaaua, GCGguaagcu, GCGguaaggg, GCGguaagug, GCGguaauca, GCGguacgua, GCGguacuug, GCGguagggu, GCGguagugu, GCGgugagca, GCGgugagcu, GCGgugaguu, GCGguggcuc, GCGgugugca, GCGguguguu, GCGguuaagu, GCGguuugca, GCUgcuguaa, GCUguaaaua, GCUguaagac, GCUguaagag, GCUguaagca, GCUguaagga, GCUguaagua, GCUguaaguc, GCUguaagug, GCUguaaguu, GCUguaggug, GCUguauggu, GCUgucagug, GCUguccuug, GCUgugagaa, GCUgugagcc, GCUgugagga, GCUgugagua, GCUgugaguc, GCUgugagug, GCUgugaguu, GCUguggguu, GGAguaagag, GGAguaagca, GGAguaagcc, GGAguaagcu, GGAguaagga, GGAguaagug, GGAguaaguu, GGAguaauuu, GGAguacugu, GGAguaggaa, GGAguaggua, GGAguagguu, GGAguaguau, GGAguaugac, GGAguauggu, GGAgucaagu, GGAgugaggg, GGAgugagua, GGAgugaguc, GGAgugagug, GGAgugaguu, GGAgugcuuu, GGAgugggca, GGAgugggug, GGAguuaagg, GGAguugaga, GGCguaagcc, GGCguaggua, GGCguaggug, GGCgugagcc, GGCgugaguc, GGGguaaaca, GGGguaaacc, GGGguaaacu, GGGguaagaa, GGGguaagag, GGGguaagau, GGGguaagca, GGGguaagcc, GGGguaagcu, GGGguaagga, GGGguaaggg, GGGguaagua, GGGguaagug, GGGguaaguu, GGGguagaca, GGGguaggag, GGGguaggcc, GGGguaggga, GGGguaggua, GGGguaggug, GGGguagguu, GGGguagugc, GGGguaucug, GGGguaugac, GGGguaugga, GGGguaugua, GGGguauguc, GGGguaugug, GGGguauguu, GGGgucagua, GGGguccgug, GGGgucggag, GGGgucugug, GGGgugaaca, GGGgugaaga, GGGgugagaa, GGGgugagau, GGGgugagcc, GGGgugagcg, GGGgugagcu, GGGgugagga, GGGgugaggc, GGGgugaggg, GGGgugaguc, GGGgugagug, GGGgugaguu, GGGgugcgua, GGGguggggu, GGGgugggua, GGGgugggug, GGGguggguu, GGGgugugcg, GGGgugugua, GGGguguguc, GGGgugugug, GGGguuacag, GGGguuggac, GGGguuggga, GGGguuugcc, GGGguuugua, GGUguaagaa, GGUguaagau, GGUguaagca, GGUguaagcc, GGUguaagcg, GGUguaaguc, GGUguaagug, GGUguagguc, GGUguaggug, GGUguagguu, GGUguccgua, GGUgugagag, GGUgugagcc, GGUgugagcu, GGUgugagua, GGUgugaguc, GGUgugcuuc, GGUguggcug, GGUgugguga, GGUgugucug, GGUguugaaa, GGUguugcug, GUAguaagau, GUAguaagua, GUAguaagug, GUAguagcuu, GUAguaggua, GUAgucagua, GUAgugagua, GUAguggugg, GUAguuaagu, GUAguuucug, GUCguaagug, GUCgugagug, GUCgugaguu, GUGgcaagua, GUGgcuugua, GUGguaaaau, GUGguaaaga, GUGguaaauu, GUGguaacau, GUGguaacua, GUGguaagaa, GUGguaagac, GUGguaagag, GUGguaagau, GUGguaagca, GUGguaagcg, GUGguaagcu, GUGguaagga, GUGguaaggc, GUGguaagua, GUGguaaguc, GUGguaagug, GUGguaaguu, GUGguaauga, GUGguaauuc, GUGguaauuu, GUGguacaug, GUGguacgau, GUGguacuau, GUGguacuug, GUGguagaua, GUGguagcgc, GUGguaggga, GUGguagguc, GUGguaggug, GUGguagguu, GUGguauaaa, GUGguaucuc, GUGguaugaa, GUGguaugau, GUGguaugca, GUGguaugua, GUGguauguu, GUGguccgug, GUGgucuggc, GUGgugaaac, GUGgugagaa, GUGgugagau, GUGgugagca, GUGgugagcu, GUGgugagga, GUGgugaggc, GUGgugagug, GUGgugaguu, GUGgugauua, GUGgugauuc, GUGgugcgau, GUGgugcuua, GUGgugggaa, GUGgugggua, GUGguggguc, GUGguguccg, GUGguuagca, GUGguuaggu, GUGguuagug, GUGguuugca, GUGguuugua, GUUguaaggu, GUUguaagua, GUUguaaguc, GUUguaaguu, GUUguaccac, GUUguagcgu, GUUguaugug, GUUguauguu, GUUgucugug, GUUgugagcu, GUUgugagug, GUUgugaguu, GUUgugggua, GUUguggguu, UAAguaaaug, UAAguaacua, UAAguaagaa, UAAguaagag, UAAguaagau, UAAguaagca, UAAguaagcu, UAAguaagga, UAAguaaggu, UAAguaagua, UAAguaaguc, UAAguaagug, UAAguaaguu, UAAguaauaa, UAAguacuag, UAAguaguuu, UAAguauaaa, UAAguauaca, UAAguaugua, UAAguauuau, UAAguauuuu, UAAgucuuuu, UAAgugagac, UAAgugagga, UAAgugaggg, UAAgugagua, UAAgugaguc, UAAgugagug, UAAgugaguu, UAAgugaucc, UAAgugauuc, UAAgugcgug, UAAguuaagu, UAAguuccag, UAAguucuuu, UAAguuguaa, UAAguuguau, UAAguuuguu, UACguaacug, UACguaagaa, UACguaagau, UACguaagua, UACguaagug, UACguauccu, UACgucuggc, UACgugacca, UAGgcaagac, UAGgcaaguc, UAGgcagguc, UAGgcgugug, UAGguaaaaa, UAGguaaaac, UAGguaaaag, UAGguaaaau, UAGguaaaca, UAGguaaaga, UAGguaaaua, UAGguaaauc, UAGguaaaug, UAGguaaauu, UAGguaacac, UAGguaacag, UAGguaacau, UAGguaacca, UAGguaacgg, UAGguaacua, UAGguaacuc, UAGguaacug, UAGguaacuu, UAGguaagac, UAGguaagag, UAGguaagau, UAGguaagca, UAGguaagcc, UAGguaagcu, UAGguaagga, UAGguaaggc, UAGguaaggg, UAGguaagua, UAGguaaguc, UAGguaagug, UAGguaaguu, UAGguaauag, UAGguaauau, UAGguaaucu, UAGguaauga, UAGguaaugg, UAGguaaugu, UAGguaauua, UAGguaauuc, UAGguaauuu, UAGguacagc, UAGguacagu, UAGguacauu, UAGguaccag, UAGguaccua, UAGguaccuu, UAGguacgag, UAGguacgua, UAGguacguu, UAGguacuau, UAGguacuga, UAGguacugg, UAGguacuuc, UAGguacuuu, UAGguagcgg, UAGguaggaa, UAGguaggac, UAGguaggau, UAGguaggga, UAGguagggg, UAGguaggua, UAGguagguc, UAGguaggug, UAGguagguu, UAGguaguaa, UAGguagucu, UAGguagugg, UAGguagugu, UAGguaguuu, UAGguauaaa, UAGguauaac, UAGguauaag, UAGguauaau, UAGguauaca, UAGguauacu, UAGguauaua, UAGguauauc, UAGguauauu, UAGguaucag, UAGguaucua, UAGguaucuc, UAGguaugaa, UAGguaugag, UAGguaugca, UAGguaugga, UAGguauggc, UAGguauggu, UAGguaugua, UAGguauguc, UAGguaugug, UAGguauguu, UAGguauuaa, UAGguauuac, UAGguauuau, UAGguauuca, UAGguauucc, UAGguauucu, UAGguauuga, UAGguauuua, UAGguauuuc, UAGguauuuu, UAGgucacuc, UAGgucagcu, UAGgucaggu, UAGgucagua, UAGgucagug, UAGgucaguu, UAGgucaucu, UAGgucauug, UAGguccaau, UAGguccugu, UAGgucucaa, UAGgucucgc, UAGgucuggc, UAGgucuguc, UAGgucugug, UAGgugaagu, UAGgugaaua, UAGgugaaug, UAGgugaauu, UAGgugacau, UAGgugacca, UAGgugacua, UAGgugagaa, UAGgugagac, UAGgugagag, UAGgugagau, UAGgugagcc, UAGgugagcu, UAGgugagga, UAGgugaggc, UAGgugaggu, UAGgugagua, UAGgugaguc, UAGgugagug, UAGgugauca, UAGgugauuc, UAGgugauuu, UAGgugcaua, UAGgugcauc, UAGgugccgu, UAGgugccug, UAGgugcgca, UAGgugcgua, UAGgugcgug, UAGgugcuga, UAGguggaua, UAGgugggaa, UAGgugggac, UAGgugggag, UAGgugggau, UAGgugggcc, UAGgugggcu, UAGguggguu, UAGguggugu, UAGguguaaa, UAGgugugaa, UAGgugugag, UAGgugugca, UAGgugugcc, UAGgugugcg, UAGguguggu, UAGgugugua, UAGgugugug, UAGguguugg, UAGguuaagc, UAGguuagac, UAGguuagcc, UAGguuaggc, UAGguuagua, UAGguuaguc, UAGguuagug, UAGguucccc, UAGguucuac, UAGguuggua, UAGguugguu, UAGguugucc, UAGguuuauu, UAGguuugcc, UAGguuugua, UAGguuuguc, UAGguuugug, UAGguuuguu, UAGguuuuuc, UAGguuuuug, UAUguaagaa, UAUguaagau, UAUguaagca, UAUguaagcc, UAUguaagua, UAUguaaguc, UAUguaagug, UAUguaaguu, UAUguacgug, UAUguacguu, UAUguagguc, UAUguagguu, UAUguauccu, UAUguaucuc, UAUguaugua, UAUguauguc, UAUguaugug, UAUguauuau, UAUgucagaa, UAUgucugua, UAUgugaaua, UAUgugacag, UAUgugagua, UAUgugagug, UAUgugaguu, UAUgugggca, UAUgugugua, UAUguguuua, UAUguuuugu, UCAgcgacau, UCAguaaaau, UCAguaaaua, UCAguaacug, UCAguaagaa, UCAguaagag, UCAguaagau, UCAguaagca, UCAguaagcc, UCAguaagcu, UCAguaaggg, UCAguaagua, UCAguaaguc, UCAguaagug, UCAguaaguu, UCAguaucuu, UCAguaugga, UCAguauggu, UCAgucccca, UCAgugagca, UCAgugagcu, UCAgugagua, UCAgugagug, UCAgugaguu, UCAgugauug, UCAgugggug, UCAguugagc, UCAguugauu, UCAguuuagu, UCCguaagca, UCCguaagcu, UCCguaaguc, UCCguaagug, UCCguaauag, UCCguacuua, UCCguaugua, UCCguauguu, UCCgugagau, UCCgugaguc, UCGguaaauu, UCGguaagag, UCGguaagcu, UCGguacauc, UCGguacucc, UCGguagacc, UCGguagguu, UCGguaguaa, UCGguaugug, UCGguauguu, UCGguauuga, UCGgucagua, UCGgucuuag, UCGgugaagu, UCGgugagaa, UCGgugagca, UCGgugaggc, UCGgugagua, UCGgugcgcu, UCGgugcuuu, UCGgugguuu, UCGguuagcu, UCUguaaaag, UCUguaagaa, UCUguaagau, UCUguaagca, UCUguaagcu, UCUguaagua, UCUguaaguc, UCUguaagug, UCUguaaguu, UCUguaauaa, UCUguaauga, UCUguaaugu, UCUguaggua, UCUguagguu, UCUguauaua, UCUguaugac, UCUguaugua, UCUguccucg, UCUgugagag, UCUgugagcu, UCUgugagga, UCUgugagua, UCUgugaguc, UCUgugagug, UCUgugaguu, UCUgugcgua, UCUgugugag, UGAguaacuu, UGAguaagau, UGAguaagca, UGAguaagcu, UGAguaaggc, UGAguaaggu, UGAguaagua, UGAguaaguc, UGAguaagug, UGAguaaguu, UGAguaaucc, UGAguaauua, UGAguacagu, UGAguacgua, UGAguacguu, UGAguacugu, UGAguagcug, UGAguaggua, UGAguauaaa, UGAguaugcu, UGAguaugga, UGAguaugua, UGAguauguc, UGAguauguu, UGAgucagag, UGAgucuacg, UGAgugaaua, UGAgugaauu, UGAgugagaa, UGAgugagau, UGAgugagca, UGAgugagcc, UGAgugagga, UGAgugagua, UGAgugagug, UGAgugaguu, UGAgugggaa, UGAguuaaga, UGAguuaaug, UGAguuacgg, UGAguuaggu, UGAguucuau, UGAguugguu, UGAguuguag, UGAguuuauc, UGCguaaguc, UGCguaagug, UGCguacggc, UGCguacggg, UGCguaugua, UGGgcaaguc, UGGgcaagug, UGGgcacauc, UGGgccacgu, UGGgccccgg, UGGguaaaau, UGGguaaagc, UGGguaaagg, UGGguaaagu, UGGguaaaua, UGGguaaaug, UGGguaaauu, UGGguaacag, UGGguaacau, UGGguaacua, UGGguaacuu, UGGguaagaa, UGGguaagac, UGGguaagag, UGGguaagau, UGGguaagca, UGGguaagcc, UGGguaagcu, UGGguaaggg, UGGguaaggu, UGGguaagua, UGGguaaguc, UGGguaagug, UGGguaaguu, UGGguaaugu, UGGguaauua, UGGguaauuu, UGGguacaaa, UGGguacagu, UGGguacuac, UGGguaggga, UGGguagguc, UGGguaggug, UGGguagguu, UGGguaguua, UGGguauagu, UGGguaugaa, UGGguaugac, UGGguaugag, UGGguaugua, UGGguauguc, UGGguaugug, UGGguauguu, UGGguauuug, UGGgucuuug, UGGgugaccu, UGGgugacua, UGGgugagac, UGGgugagag, UGGgugagca, UGGgugagcc, UGGgugagga, UGGgugaggc, UGGgugaggg, UGGgugagua, UGGgugaguc, UGGgugagug, UGGgugaguu, UGGgugcgug, UGGguggagg, UGGguggcuu, UGGguggggg, UGGgugggua, UGGguggguc, UGGgugggug, UGGguggguu, UGGgugugga, UGGguguguc, UGGgugugug, UGGguguguu, UGGguguuua, UGGguuaaug, UGGguuaguc, UGGguuagug, UGGguuaguu, UGGguucaag, UGGguucgua, UGGguuggug, UGGguuuaag, UGGguuugua, UGUgcaagua, UGUguaaaua, UGUguaagaa, UGUguaagac, UGUguaagag, UGUguaaggu, UGUguaagua, UGUguaaguc, UGUguaaguu, UGUguacuuc, UGUguaggcg, UGUguaggua, UGUguaguua, UGUguaugug, UGUgucagua, UGUgucugua, UGUgucuguc, UGUgugaccc, UGUgugagau, UGUgugagca, UGUgugagcc, UGUgugagua, UGUgugaguc, UGUgugagug, UGUgugcgug, UGUgugggug, UGUguggguu, UGUgugugag, UGUguguucu, UGUguuuaga, UUAguaaaua, UUAguaagaa, UUAguaagua, UUAguaagug, UUAguaaguu, UUAguaggug, UUAgugagca, UUAgugaguu, UUAguuaagu, UUCguaaguc, UUCguaaguu, UUCguaauua, UUCgugagua, UUCgugaguu, UUGgcaagug, UUGgccgagu, UUGguaaaaa, UUGguaaaau, UUGguaaaga, UUGguaaagg, UUGguaaagu, UUGguaaauc, UUGguaaaug, UUGguaaauu, UUGguaacug, UUGguaacuu, UUGguaagaa, UUGguaagag, UUGguaagcu, UUGguaagga, UUGguaaggg, UUGguaagua, UUGguaagug, UUGguaaguu, UUGguaauac, UUGguaauca, UUGguaaugc, UUGguaaugu, UUGguaauug, UUGguaauuu, UUGguacaua, UUGguacgug, UUGguagagg, UUGguaggac, UUGguaggcg, UUGguaggcu, UUGguaggga, UUGguaggua, UUGguagguc, UUGguaggug, UUGguauaaa, UUGguauaca, UUGguauauu, UUGguaucua, UUGguaucuc, UUGguaugca, UUGguaugua, UUGguaugug, UUGguauguu, UUGguauugu, UUGguauuua, UUGguauuuu, UUGgucagaa, UUGgucagua, UUGgucucug, UUGgucugca, UUGgugaaaa, UUGgugacug, UUGgugagac, UUGgugagau, UUGgugagca, UUGgugagga, UUGgugaggg, UUGgugagua, UUGgugaguc, UUGgugagug, UUGgugaguu, UUGgugaugg, UUGgugauua, UUGgugauug, UUGgugcaca, UUGgugggaa, UUGguggggc, UUGgugggua, UUGguggguc, UUGgugggug, UUGguggguu, UUGguguggu, UUGguguguc, UUGgugugug, UUGguguguu, UUGguuaagu, UUGguuagca, UUGguuagug, UUGguuaguu, UUGguuggga, UUGguugguu, UUGguuugua, UUGguuuguc, UUUgcaagug, UUUguaaaua, UUUguaaaug, UUUguaagaa, UUUguaagac, UUUguaagag, UUUguaagca, UUUguaaggu, UUUguaagua, UUUguaaguc, UUUguaagug, UUUguaaguu, UUUguaauuu, UUUguacagg, UUUguacgug, UUUguacuag, UUUguacugu, UUUguagguu, UUUguauccu, UUUguauguu, UUUgugagca, UUUgugagug, UUUgugcguc, UUUguguguc, and uGGguaccug.

[0464] Additional exemplary gene sequences and splice site sequences (e.g., 5′ splice site sequences) include AAGgcaagau, AUGguaugug, GGGgugaggc, CAGguaggug, AAGgucagua, AAGguuagag, AUGgcacuua, UAAguaaguc, UGGgugagcu, CGAgcugggc, AAAgcacccc, UAGguggggg, AGAguaacgu, UCGgugaugu, AAUgucaguu, AGGgucugag, GAGgugacug, AUGguagguu, GAGgucuguc, CAGguaugug, CAAguacugc, CACgugcgua, CCGgugagcu, CAGguacuuc, CAGgcgagag, GAAgcaagua, AGGgugagca, CAGgcaaguc, AAGgugaggc, CAGguaagua, CCAguugggu, AAGguguggg, CAGguuggag, CCGguaugaa, UGGguaaugu, CAGgugaggu, AGAguaauag, CAGguaugag, AUGguaaguu, UUGguggguc, UUUguaagca, CUCguaugcc, UAGguaagag, UAGgcaaguu, GGAguuaagu, GAGguaugcc, AAGguguggu, CAGgugggug, UUAguaagua, AAGguuggcu, UGAguaugug, CCAgccuucc, CCUguacgug, CCUguaggua, CAGguacgcu, GAGguucuuc, AAGguugccu, CGUguucacu, CGGgugggga, UAGgugggau, CGGguaagga, AAGguacuau, GGGguaagcu, ACGguagagc, CAGgugaaga, GCGguaagag, CAGguguugu, GAAguuugug, AUGgugagca, CGGguucgug, AUUguccggc, GAUgugugug, AUGgucuguu, AAGguaggau, CCGguaagau, AAGguaaaga, GGGgugaguu, AGGguuggug, GGAgugagug, AGUguaagga, UAGguaacug, AAGgugaaga, UGGguaagug, CAGguaagag, UAGgugagcg, GAGguaaaaa, GCCguaaguu, AAGguuuugu, CAGgugagga, ACAgcccaug, GCGgugagcc, CAGguaugca, AUGguaccua, CAAguaugua, AUGguggugc, UAAguggcag, UAGguauagu, CUGguauuua, AGGguaaacg, AUAguaagug, UUGguacuga, GGUguaagcc, GAGguggaua, GAUguaagaa, ACGgucaguu, UAAguaaaca, AAGguaucug, AGGguauuug, AAGgugaaug, CUGgugaauu, CAGguuuuuu, CAUguaugug, UUGguagagg, AAGguaugcc, CAGgugccac, UCGguauuga, AAGguuugug, AAUguacagg, CAUguggguu, CAUgugaguu, UUGguaaugu, AGUguaggug, GAGguaacuc, GAGguggcgc, CUGguaauug, GAGguuugcu, UGUguacgug, UAGguaaaga, CUAguaggca, UCUgugaguc, UCUguaaggc, CAGguuugug, GAGguagggc, AAGguaacca, ACUgugaguu, UAGguaauag, AAAguaagcu, AUGgugagug, UAGguuugug, AACguaggac, GUAgcaggua, GAGgucagac, AGGguaugaa, GAGguuagug, CAGgcacgug, GGGgcaagac, CAGguguguc, CAGguauuga, CAGguauguc, AAGgcaaggu, UUGgugagaa, AAGguaaaau, GGGguaagua, AAGguaucuu, GACgugaguc, UAUguaugcu, AAGguacugu, CAGgugaacu, CACguaaaug, AAGgugugau, GAAguauuug, AAGgucugug, AAGguggagg, AAGguauaug, CAGguucuua, AGGguaacca, CAGgugucac, AAAguucugu, UUGgugaguu, CAAgugaguc, UAGguagguc, GCGgugagcu, AUUgugagga, CAGgugcaca, CAGguuggaa, CUGgucacuu, GGAguaagug, GAGgugggcu, AAGguacuug, AGGguaggau, AAUguguguu, ACAguuaagu, GAGgugugug, AAGgcgggcu, AUAgcaagua, AAGguuguua, CAAgcaaggc, GUGguaauua, UCUguucagu, AGGguaggcc, AAGguaucau, UAGguaccuu, AAGguaugac, GGAguaggua, UAAguuggca, AGUgugaggc, GAGguuugug, UGGgucugcu, CAGgugaucc, CAGgucagug, AAGguaaggg, CAGgugcagu, GAGguggguc, GCUgugagug, AAGguggagu, GGGgucaguu, AGCguaagug, AGAguaugaa, GGGguagggu, AAGgccagca, CGAguaugcc, GUGgugagcg, AAUguaaauu, CAGgugcgca, GGUguaugaa, CUUgugaguu, AAGguaucuc, AGAguaagga, UAGguaagac, GAGgugagug, CAGguguguu, UUGgugagua, AGGgcgaguu, CAGguuuugc, UUUgugaguu, AGGguaagca, GAGguccucu, CCAgcaggua, GAGguucgcg, CAGgugaucu, ACUguaagua, AAGguaaauc, CAGgcaaaua, GUGguaagca, CAGguuaaau, UUGguaauaa, UAUguaggua, CAGguaguau, AAGgugugcc, UGGguaagag, CAGgcaagca, UUGguaaggg, AAGgcaggug, ACGguaaaug, GCUgugagca, AUGguacaca, GUAguguguu, ACUguaagag, CCCgcagguc, GAGgugagcc, GAGgugcugu, UAAguaugcu, GAGgccaucu, UCAgugagug, CAGgugcuac, AAUgugggug, GAGgugugaa, CUGguagguc, GUGgcgcgcg, CAGgugcaaa, UAAguggagg, CAUgugggua, GAGguagggu, AAAgugaguu, AGGguucuag, UGUgugagcu, AGGgugaauc, CAGgucaggg, AAGgucccug, CUGguagagu, UAGgucaguu, AAAguaaggg, CAAguaugug, CAGgugcuuu, AAGguaauuc, GGGgugcacg, ACUgugcuac, CAGguaccua, CAGguagcuu, UGGgugaggc, CUGguacauu, AGGguaaucu, CAGguacaag, CAGguaauuc, AGGgcacuug, UAGgugagaa, GAGguaaugc, CCAgugaguu, AAAguaugug, CUGgugaauc, UAUguaugua, CCUgcaggug, CAGguaucug, GAGgugaggu, CUGguaaaac, UGUgugugcu, CAGguuaagu, CAGguaaucc, UAGguauuug, UGGguagguc, CAGguaacag, AGCgugcgug, AAGgucagga, GGUgugagcc, CUGguaagua, GGGgugggca, AAGgugggaa, CAGgugagug, CUGguuguua, CAGguaauag, UAGgugaguu, AGAguaaguu, UAGguaaucc, CCGgugacug, GUCgugauua, CUUguaagug, UAGguaguca, CUGguaaguc, AGGgugagcg, CAGguaugga, AUUgugacca, GUUgugggua, AAGguacaag, CUAgcaagug, CUGgugagau, CAGgugggca, AUGgcucgag, CUGguacguu, UUGgugugua, GAGgugucug, GAGgugggac, GGGgugggag, GCAgcgugag, GAGguaaaga, GAGguaugua, AAGgugagac, AAGguacaau, CUGguaugag, AACguaaaau, GUGguaggga, CUGguaugug, CUUguaagca, AAGguaggga, AUUguaagcc, AUGguaagcu, CAGgugaauu, UAGgugaaua, CAAguaugga, AUGguauggc, GAGgucaugc, CAGguacccu, ACAgugagac, CAGgucugau, GAAguugggu, CUGgugcgug, CAGguacgag, ACAgugagcc, AAGguaagua, GGAguaaggc, GAGgugugua, AAGgucauuu, CAGguagucu, AUGguaucug, AAGguaaacu, GAGguaggug, CUGguaagca, AGGguaagag, AAAguaaagc, CAGguuugag, GAGgcgggua, CGAguacgau, CAGguuguug, AAAguauggg, UAGgcugguc, AAGguaagga, AAGguuuccu, UUGguaaaac, GAGguaagua, CAGguucaag, UGGguuaugu, GAGgugaguu, ACGgugaaac, GAUguaacca, AAGgugcggg, CCGguacgug, GAUgugagaa, GUGgcgguga, CAGguauuag, GAGguuggga, AAGgcuagua, AAGgugggcg, CAGgcaggga, AAUguuaguu, GAGguaaagg, CAGgugugcu, CUGguaugau, AUGguuaguc, CUGgugagaa, CAGgccggcg, CAGgugacug, AAAguaaggu, UAAguacuug, AAGguaaagc, UCGguagggg, CAGguaggaa, AGUguaagca, CCCgugagau, GUGguuguuu, CAGguuugcc, AGGguauggg, UAAguaagug, GAGguaagac, GAUguagguc, CAAguaggug, AUAguaaaua, GAGguugggg, GAGgcgagua, CAGguagugu, GUGguaggug, CAAgugagug, AAGgugacaa, CCAgcguaau, ACGgugaggu, GGGguauauu, CAGgugagua, AAGgugcgug, UAUguaaauu, CAGgucagua, ACGguacuua, GAGgucagca, UAAguaugua, GGGgucagac, AAUgugugag, UCCgucagua, CAGgugcuuc, CCAguuagug, CCGgugggcg, AGGgugcaug, GGGguaggau, UAGgugggcc, GAGguguucg, UUGgcaagaa, UCCguaagua, CAGguguaag, CUCgugagua, GAGguguuuu, GAGgugagca, GAGguaaagu, AAGguacguu, CAGguccagu, AUGgugaaac, GUAgugagcu, CAGgugaaaa, AGGguacagg, AAGguaacgc, AAGguauacc, CCUgugagau, GGGguacgug, GAGguauggu, UAGguauuau, GAAguaggag, UCGguaaggg, CCGguaagcg, GAAguaauua, CAGgugaguc, AAGgucaaga, AUGguaaguc, CAGgugagcu, CCAguuuuug, CAGgugggag, AAGguauuau, AAGguaaaua, AAGgugcugu, AAAguacacc, CUGguucgug, UCAguaaguc, GAAguacgug, CAGgugacaa, UGGguaagaa, UGUguagggg, GAGguaggca, UUGgugaggc, AUGgugugua, CAGguccucc, UUGguaaaug, GCUgugaguu, AUGgucugua, CAUgcaggug, CUGguacacc, CAGguccuua, CAAguaaucu, AUGgcagccu, AAGgucagaa, AACgugaggc, CAGgcacgca, ACGguccagg, UCUguacaua, GAGgugauua, ACGguaaaua, AUGguaacug, CAGgcgcguu, CAGguauaga, AAGguuuguu, CAGguaugaa, UAGguuggua, CUGgugagac, CAGguuagga, AUGgugacug, UUGguauccc, CUUguaggac, AAAguguguu, CAGguuucuu, GGGguauggc, GGGguaggac, ACUguaaguc, AUCguaagcu, UAGguucccc, GGUgugagca, CUGguuggua, GGGguuaggg, UGAguaagaa, GAGguauucc, UGGguuaguc, CAGgcucgug, UAGguagagu, UAGgugcccu, AAAgugagua, GAGguucaua, UUGguaagag, ACCgugugua, UAUguaguau, UGGguaauag, CAGgucugaa, AAAguauaaa, GUGgugaguc, AGUgugauua, UUGgugugug, CAGgugaugg, GCUgugagua, CAGguacaug, AAGguacagu, GAAguuguag, CAGgugauua, UAGgugaauu, GGUguuaaua, CAGguauuua, CAAguacucg, CAAguaagaa, AAGguaccuu, ACGgugaggg, UGAgcaggca, GGGgugaccg, GAGguaaaug, CGGguuugug, AAGgugagcg, GUGguaugga, CUGguaagga, GAGguaccag, CCGgugagug, AAGguuagaa, GAGguacuug, AGAguaaaac, UCUgugagua, AAGgcgggaa, CAGguaugcg, AGGguaaaac, AAGgugacug, AGGguauguu, AAGguaugua, CAGgucucuc, CAGgcaugua, CUGguaggua, AAGgucaugc, CAGguacaca, GAUguacguu, ACAguacgug, ACGguaccca, CAGguagugc, ACAguaagag, GGUgcacacc, GAGguguaac, AAGgugugua, UAGguacuua, GCGguacugc, UGGguaaguc, CAUguaggua, CAGguaggau, CAGgucuggc, GUGguuuuaa, CAGgugggaa, UGGgugagua, CGAgugagcc, AAGguauggc, AGUguuguca, CAGgugauuu, UAGguaucuc, UAAguauguu, AAGguugagc, AGAguaaaga, GGUguaagua, GGGgugagcu, CAGguauaau, GAGguacaaa, AUGguaccaa, UAGguagggg, UGAgucagaa, AAGgcaauua, UUGguaagau, CAGguacaga, AGAguuagag, CAGgugcguc, GAGguauuac, ACGguacaga, CAGgucuucc, AAGguaaggu, GAGguaauuu, AGUguaggcu, AAAguaagcg, CCUguaagcc, AGGgugauuu, UGUguaugaa, CUGguacaca, AGGguagaga, AUAguaagca, AGAguaugua, UUGgucagca, CAGgcaaguu, AAGguauaua, AAGgucugga, CAGguacgca, AGGgugcggg, AUGguaagug, AAAgugauga, UGCgugagua, AGAguaggga, UGUguaggua, UAGguaggau, UAAgugagug, GCUguaagua, GAAguaagaa, UCGgugaggc, UAGguauuuu, AAGguacaca, AAGguaggua, UGGguagguu, ACAgcaagua, GAGguaggag, UGGgugaguu, GCGgugagau, CCUguagguu, CAGgugugua, CUGguaagcc, AAGgugauuc, CAGguagcua, GUUguaagug, AUGguaagca, AUAguaggga, GGGguucgcu, CCGgucagag, GUAguaugag, CGUguaagau, UGAguaggca, UCAguaugua, GAGguaucug, AGAguauuuu, AAGguuguag, AGUguaaguu, CGGguaaguu, UCGgugcgga, UAGguaagua, GAAguuagau, GCUgugagac, CAGgcaggua, CAGguagggg, UAAguuaaga, AUGguggguu, UAGguaaguu, CUGguaaauu, CCGguaagga, GAGgcaggca, CAUguaagug, AAGgugccua, UUGguaggga, AAGguaaaca, CGGgugugag, GGGgugugag, UCCguggguc, ACGguaaauc, UCAguaggua, CAGgucagcc, CAGgcggugg, CGAguaagcu, CCCgugagca, AAAguaauga, CUGguaagcu, CGGguaacca, CAGgucgcac, GAGguaggcc, UAGgugagcc, UAGguaggca, GCGgugcgug, AUGgugagua, GGGgugaggg, GAGgucacac, CAGguaggcc, CAAgugcuga, GUCgucuuca, CAUguaagaa, GUAguaagga, UAGguuugua, CAAguuagag, AAGguagagu, AAGgugagau, AAAguaggua, ACAgugaauc, CAGgugugcg, CAGgucggcc, AAGguaguau, ACUgucaguc, UCUgcagccu, CGAguaagug, AGAguaauua, AGUgugagug, CCGgugagcg, AAGguaaccu, AAGguugugg, AAGgcauggg, AAGgucagag, ACGguaaggu, GGGgugagca, GAGguugcuu, AAGguaucgc, CCGguaaagg, AAAguuaaug, UAGguacgag, ACCguaauua, GGGguaagga, CCGguaacgc, CAGgucagaa, AAGguacuga, GAGgugacca, GGGgugagcc, AAGguacagg, AUGguaauua, CAGgugagag, AAGgugacuc, AUAguaagua, GAGguaaacc, CAGgugggau, CAGgugagaa, AGGguaaaaa, GAGgugugac, CACguaagcu, CAGguccccc, CAGgucaggu, CGGguaaguc, ACGguauggg, GAUguaaguu, CAAguaauau, CAGguugggg, CCUgugcugg, AAGguaugau, AGGguagagg, AAGguggguu, CAGgugugaa, UUGguaugug, UUGguaucuc, GGGgugagug, CUGgugugug, AGGguagggc, GUGgugagua, CAGguaugua, AAGguacauu, UUAguaagug, AAUguauauc, CUUguaagua, GAGguuagua, CAGguaaggu, CAGguaaugu, AGGgugaggc, CAGguauuuc, CAGgucugga, GGGgugugcu, UAGgugagug, AAUguaaccu, UAAgugaguc, CAGgugcacu, ACGguaagua, GAGguauccu, UCUguaaguc, CAGguauuca, UGUguaagug, CCAgcaaggc, GAGgugaagg, AAUguggggu, UCGgugcgug, UUGguaaggc, GAGguaagug, AAAguaagau, UAGgucuuuu, GAGgucugau, CCAguuagag, UGGgugaaaa, AGAguaagau, CAGguaauug, CAGgccgguc, CCGguaagag, GAGgugagcu, CUGguaagac, CAGgugagau, CUGguuuguu, UGGguaggua, CAGguuagug, CAGguguucg, CGGguagguc, GUGguacaua, AAGguacuaa, GAUgugagua, UGUguaagac, GAGguagccg, UAGgugaucu, CAGguacgug, CUUgucaguc, GAGguaucac, GAGguaauga, AAGguaacac, CAGguaaagc, AAGgcaagua, CGCgugagcc, AGUgugcguu, GAUguaagca, AAGguaauag, GGAgcaguug, AGCguaagau, AAGgucaggc, GAGguauuca, AAUguaaagu, CAGguaacaa, UCGguaggug, AAAguaaguc, CGGgugcagu, GGUgugugca, UGAgugagaa, CACguguaag, GUGguuggua, GCAgccuuga, CGAgugugau, CAGguauaua, UAUguaugug, CCCgugguca, AUGguaagac, GAGgugugga, AGUguauccu, UGAguguguc, UGGguaaucu, AUGgcagguu, GAGguaagau, UCAgcagcgu, AAGgugggau, CGGgugcgcu, CAGgugucug, AGCgugguaa, AAUgugaaug, UCGgugagac, UAGguaaagc, CUGguaaaag, CCGgugcgga, CAGguacuca, CAGguagcaa, GAAguugagu, GAGguggagg, AGGguaugag, UAGguaugcu, UAGgugagac, CAGguaauua, CGUguaagcc, CUUguaaguu, AAGguaacuu, UCGgcaaggc, GAGguucucg, GAGgugggcg, AAGgcaugug, CUGguauguu, UAAgucauuu, CAUguaauua, AAUguaaaga, UAGgugcuca, AAGguaaugg, GAGguacuga, UGGguaagua, UGGguaaaaa, AAGgugagcu, UACgugaguu, AGGgugagcc, CGGgugagga, UGGgugagag, GGUguaagcu, CGGguggguu, CCAgcuaagu, AAGguuuguc, GAGguuagac, GAGguaccuc, UUUguaaguu, GAGguuagga, CAGguaggga, AGGguaauac, UGCgugugua, CCAguaacca, AGGgucuguc, UGGguaugua, GUGguaagcu, CAGguaaccu, AAGgugaguu, UAGguucgug, AAAguuagua, UGGgcaaguc, AAGgcacagu, GUUguaaguc, AAGguuugcc, CUUgcauggg, GCGgugagua, GGGguaagcg, GCCguaagaa, GAGgucggga, UUGguauugu, AGUgugagac, CUGgugggga, AGAguaaggu, CCGguggguc, CAGguauucu, UGGguaacgu, UUGgugagag, UAGguacccu, GGGgugcguc, AAGgcaggag, ACGguacauu, GAGguaguua, CAGguauggg, UUUguguguc, CAGguacuua, AUGguauacu, AGUgugagcc, ACAguaacga, CUGguaccca, CAGguaaccc, GGAguaagua, GAGgugggug, ACUguauguc, ACGgugagua, CUGguaaugu, AAGguaucag, CAGgugcccc, AGUgucagug, AAGguaggag, GGAguaugug, UUGguauuuu, CCUguuguga, UUUguaagaa, UAGguaacau, CAGguaagca, CAGgucacag, CAGgugugag, UAGguuugcg, CUGguaagaa, ACGguuguau, AAGguugggg, AAGgugaauu, GGGguuaguu, ACGguaaggc, CAGguuuaag, CUGguaaguu, GGGgugagag, UGGguggguu, GAGguuuguu, UGGguaaaug, CAGgcaggcc, CACgugcagg, AAGgugagcc, CAAguaagug, CAGgucaguc, GCGguauaau, UAGguaaagu, UAGguggauu, GAGgucugga, UCGgucaguu, UGGguaacug, AAGguuugau, UGUgcuggug, UGUguaccuc, UGGguacagu, AUCgucagcg, CAGgucuugg, GAAguuggua, GAAguaaaga, UUGguaagcu, UAGguaccag, AGGguaucau, CAGguaaaaa, ACGguaauuu, AUUguaaguu, GAGguacagu, CAGgugaaag, UGGguuguuu, GGGguaggug, CAGgugccca, AGCgugagau, CCAgugagug, AGGguagaug, UGGguguguc, AUCgcgugag, AGGguaagcc, AGGguagcag, UUCguuuccg, AAGguaagcg, UGGguaagcc, CAGguauggc, UGUguaagua, AAGguagaga, ACGguaauaa, CUGguacggu, GAGgucacag, UAUguaaguu, CUGguacgcc, CAAguaagau, CUAgugagua, CCGguaaccg, CUUguaaguc, GUGgugagaa, ACCguaugua, GUAguaagug, UUGgugggua, CGGguacuuu, UGGguaaaua, AGAgugagua, AAGguagguu, AAGguaugcg, CCUguaggcu, ACAguagaaa, CCGguuagua, CGGguaggcg, GCAgugagug, GAGgugaguc, CUGguagccu, CAUguaugua, GAAguaacuu, GAAguaagau, AAGguuagau, AAGguaauca, AAUguaugua, UGAguaagau, AGAgugagca, GUAguucuau, GAGguaauca, UAGguaugga, UAGgugggac, GAGguacaug, UGGguaaggc, CAGguacgcc, CCAguuacgc, ACUgugguga, GAGguaaguc, AUUguaggug, ACCgucagug, AAUgugaggg, ACUgugagug, UGGguguggu, AAGguuggga, AAGguuugga, UCCgugagug, CGGgugagug, AGAguaagcu, CAGgcaagcu, UAGguauauu, AAAguagcag, GAGguaaccu, AAGgugggca, AGGgugagua, UGGguaaggu, CUUgucagug, UAGgugcgcu, GAGgcaaauu, AGGguaccuc, CAAgugcgua, AGAguaagac, GUGguaaaua, GAUguaagcg, GAGguaaagc, UAGgugagua, CAGguaacau, CCUguacggc, UAGguauguc, UAGguccaua, GAGgugaaaa, AAAguacuga, UUGguaagcg, CAGgcaagcg, UUUgcagguu, CAGguuuaua, CUGguaaagc, AUGgugagcu, CAGgugguug, GUAguaaguu, CAGguaauac, CAGgcaaggc, AAGguaauuu, UUUguccgug, GAGguagguu, ACCgugagug, CAAguaagcu, ACAgugagua, UUGgugagau, AAGguagucu, CAGguaaagg, GGGguaugga, UUUguaagug, GUGguaagag, AGUgugaguu, AAGgcaagcg, UAAgugagua, AGGgugagug, AGUguacgug, AGGgugcgua, GGCgugagcc, CGAguuauga, CAGguaaaga, UUGgugaaga, AGGguaaugg, AAGguccaga, AGUgugaguc, CAGguaauuu, CAGguaacgc, CUGguacacu, CUGguuagug, CAGguacuug, CACguaagua, GUGgugcggc, GAGgucaguu, AUGguaugcc, AAGgugugug, CUGguggguc, CAGgugaggc, AAGguuaguc, AAGguagcug, GAGgucagga, GUUguaggua, UGGguacaag, AUGguaggug, GAGguaagcc, AUGgcaagua, AAGguauauu, GCGgugagag, AAGgugcuuc, UAGguacauc, ACUgugguaa, GAGguaggcu, GAGguaugca, AGGguaguuc, CAGguauccu, AGGguaaguc, AGGgucaguu, CAGguuggga, CAGguggaua, GGAguagguu, GAGguaggau, GGGguuugug, UAGguaauug, AAGguaaccc, ACGguaagaa, GAGguagggg, CGAguaggug, UCCguaagug, UCGguacagg, CAAguaagcg, AAGguccgcg, AAUgugagua, CAGgugaaug, GUGguaaggc, AGAgugagug, UCUguauguc, UGGgugaguc, UCGguuagua, GAUguaugca, GAGguuggug, GAGguggggc, UGGgucaguc, GCAgugagua, CAGguugcuu, AGGguagagu, UAGgucaggu, CGCguaugua, GAGguauuaa, CAGguaaacu, AAAguaaguu, GGGgucuggc, GCUguggggu, UUGguaaguc, AAGguagaag, AAUgugaguc, AAGgucagcu, AAGguaagag, AUGgugagga, AAGguacuuc, AAGguaagaa, CCGguacagc, GCGgugcgga, CAGguacaua, CUGgugagga, CUGguaggug, AACguagguu, AUGgugugug, UUGguacuau, CAGgucggug, CAGgcauggg, AUGguaucuu, AAGguaacua, CAGgugggcg, CACgugagga, AAGgugguuc, UGGgcauucu, AUGguaagcc, AGGgucagug, AGAguacgua, AAGguaggca, AAGguauuca, CAGguagauu, GAGguauuua, GAGgucuaca, GUUguagguc, CAGguacucg, GUCguauguu, AAGguacuuu, AGAgugagau, AGUguuggua, AAUgugagug, AAGguagauu, AUGguuugua, GAGgccccag, AUGgucaguu, UCUguaagga, CAGgucgggc, CAGguaagcc, UAGgucagug, AGAguaggaa, CUGguacuuc, CUCguaagca, CAGguaacua, CAGguggcug, UGGguccgua, GAGguugugc, CAGgugcgcg, AAAguauggc, UGAguacgua, CUGguacgga, CAAgugaccu, AAGgugaugu, AAGgucugca, AAAguuugua, AAGgugagca, GAUguaagcc, CAAguaauuu, CAGgugugug, UGGgugaggg, AAGgugaccu, UAGgugugag, CAGgcagguc, UCAguaaguu, UCAgcaguga, AAGguaccac, UAAguaggug, AAGgucagcc, CAGguaacuc, AAAguaagag, AAGguagaua, AAGgcaaggg, CAGgugucgg, CAGguggcua, GAGguugcca, CAGgccgugg, UUGguauaug, GAGguugagu, GAGguagguc, GUGguaagac, UAGguccuuc, GAGgcaaguc, GAGguaacau, CAGguauauc, UCGguugguu, CAGgugaacc, CAGgucuuuu, CAGgcauggc, AAAguacuug, CAGgugauuc, UUGguagguu, UAUgugagca, CAGgugagcg, AAUguaauaa, AAAguaaggc, UAGguuuguc, UAGgugggag, GAGguaaguu, AAGguagccg, CAGguggugc, UGAgucaguu, CUGguaggcc, CAAguaagga, CGGguaaggc, AAGgcgagga, CAGguaguuc, CAGguaagga, CCUgugagug, AAGguaaaug, CCGguaauua, CAGguaaguu, AAGgugguca, CAGguaccuc, AUCguaagua, CCGguacaua, GCGgugagug, GAGgugguau, CUGgugugga, GAGguaauuc, CAAguacgua, UCUguaagug, AAUguaagug, AGGgucuguu, GAGguacugc, AGGguaaggc, AAGgcaagag, CAGguggguu, UAGguuagga, UGAguaagcu, AGAguaagag, AUGgcaggug, UAGgcaagua, AUGguaggua, GCAgcccgca, ACGguaaacu, AGGgugaguu, GUAguagucu, GUGgcugaaa, CAGguuaguc, CUGgugagca, UCAguaagug, AAAgugauug, UAGgucugga, GAGguguuuc, AAGguaaauu, CAUguacauc, AAGguuugaa, CCAgcaagug, UAGguaauaa, GAGgcaagug, CAAgugauuc, CAGgucgugg, GAAguaugcc, UCGgugcccu, GAGgucaguc, CAGgugagac, UUUgucugua, CAGguagaua, UGGguaucag, UAGgugggcu, AUGgugagau, CAGguaacac, CCGguauccu, UAGguaagcu, UCAguacauc, UAGguuugcc, AUGguaagaa, UUGguaagac, CCGguuaguc, GAGguaagaa, UGGguaaguu, CCGgugagaa, CCUgugaggg, ACGguaggag, ACAguauguc, CAGguauuaa, CAGguggauc, AGAgugcgua, AAGgugaccg, AGAguaggug, ACUguaugua, UAGgucaauu, AGUguguaag, CGGguaccuu, CUAgugaguu, CUAguaagug, CAGguacaac, UAGgugugug, CAUguacggc, AUGgugugag, AGGguggaag, CAGgugcgag, UAGgugcucc, AAGguggugg, AAGgucuguu, CAGgugggcc, AAGgucaguc, CAGguuuuua, AACgugaggu, CGGguaagag, UUUgucggua, UAGguuaagu, GUGguaagaa, CAGguauugg, GCUguaaguu, CUAguaagua, UCGguaaaua, CAGguaacuu, CCUgugagua, CAGguuauau, CUGgugaaca, AAGguauaaa, GAGguaagca, AAGgugaagc, CAGgugaguu, UUUgugagua, CUUguacgcc, AGAguaagug, UGGguaggug, UGAgcccugc, UGUguaugua, AAGguagagg, GAGguggggg, UAGguaauuc, AAGgcauggu, AGAguaagca, AAGguaggaa, CAAguaagua, ACUguaauug, CAGgucugug, UCGguaccga, CUGgugagag, AAGguuugcu, AUGguaccac, UAAguuaguu, CAGguaggac, AGAgugaggc, CGAgucagua, CAGgucugag, GAGguggugg, ACGguauugg, GCUgcgagua, CUGguaagug, GUGgugagau, GGGguuugau, UCUgugagug, CUUgucagua, GAGguaaaac, UCUguaagau, CCAguaaguu, CAGguaaagu, GCGgugagca, UAAguaagag, CUGgcaggug, GAGguaaggg, UGAguaaguu, GAGgugagac, GCUgucuguu, AAGguaacaa, GAGguaacgg, CUGguauucu, CAAguaacug, AAGguggggu, UAGguauggc, CAGguauuuu, GUGguaaacu, GAGgucugag, CUGguaaggu, CAAguaaguu, AAGguagacc, GAGgcgagcg, CUGguaaaua, UGUguaagcg, CAGguuaggg, GGGgugagga, ACAguaugug, CCGgugggga, GAGgucagug, AGGguaaggu, ACAguaagua, GGUguaaggu, GAGguaauaa, CAGguauucc, CUGguauaaa, CCGgucugug, CAGguaacug, GCAguaagua, AAGguagggg, CAAguccacc, CAAguuggug, CAGgugcggu, CAGguaaaau, ACGguaagga, UGGguaauaa, UAGguaagug, CCGguagguu, AGAguaugga, CUCgugaguc, AAAgccggug, UUGguaauuu, GAGguaaaag, CCUgugugag, AAAguaagga, UGAgugagug, AAGguacaug, CCGguaaaug, CAGgugaagc, CAGguacccg, GAGguaaggc, UUUguauguu, CAGgugcucc, UCGguagguc, CGGgugaggc, AAGguaauua, ACUgugaguc, AAGgucagca, GUGgugagug, CAUguccacc, AAGgugaccc, CGGguuagua, GCGguaguaa, GCUguaggua, CCUguugagu, UAGgucuggc, GAUgugagcc, CUUgugagua, CUGguguguu, GAGgcaugug, CAGgcaagag, UUGguaagaa, GAGguguggg, GAGguauuuu, CAGguaguaa, AGGguaagac, UUUguaggca, AGGgugagau, GAGguuugua, AAGgugagug, GAGgugggag, AAGgugagaa, CUGguaagag, AUAguaaaga, GAUgugaguc, AAGgugcagg, CAGgucuguc, GAGgugauuu, CAGguuggcu, CGGguauggg, AUGguccauc, CCGguuggug, GGAguaaguc, AAUguaagga, CAGguuuguu, UAGgugugua, UAUgucuuug, ACGguacuuc, AAGgcacgcg, CUGguaaacc, CUUgugggua, UGAguaaguc, CUGgugggug, GAGguggaga, GUGguggcug, GUGguaagug, AACgugagua, GAAgcuguaa, CGGguaucuu, CAGgugucag, AAUguacgca, CCGgugggua, UGGgugaggu, AAGguauguu, CAGguauguu, CAGguuugcu, UUGguaaguu, CAGguaguug, CCUgugaaua, GCUgugugug, CAAguaauuc, AGGguaaugu, GCUgugaguc, ACCguaaguu, CGUguaagua, GGGguaaguc, AAUguaugau, AAUgugauua, UCAguaagaa, CAGguccguc, GAAguauuga, UUGguaagga, CAGgucgguu, UAGguuagug, ACGguaaaac, AAGguagguc, UACgugagua, UUGguaagca, GCGgugaguc, GAAguaaggg, CGCgugaguu, CAGguacccc, UCUguaagac, GAGgugggca, AAUguaagac, CAGgcaaggg, CAAguaacua, AAAguuuguc, CAGguacugu, AAGgucccuc, UCGguaaguc, UGGgugagug, CUUgugagau, AGAgugagcu, UAAgugggga, UAGguaggga, CAGguuagcc, AGGguaauca, AAGguucagc, UGGgugggug, CAGguuguga, AAGguaagug, CAUgugcgua, CCGguauauu, ACCguaugug, CAGguauagu, CAGguauuac, CAGgugcagg, GUGgugagcu, AAGguaacau, CUGgugaugg, AUGguaaaug, CCGgugagca, AAGguaaacc, AAGguacugg, GCGgucagga, CUGgucaggg, AAAguacguu, AGAguagguu, AGGguaagcu, AUUgugagua, CCGgccacca, GAGguaacuu, GAGguaugaa, CAGgucagac, UAGgcgugug, AGGguaaguu, CAGgcaugag, CAGguaacgu, CAGgcgagca, UAGguauggu, AGAguaggau, CUGguuucaa, GAGguaaacu, CAGgcaugca, UUGguaaucu, AGGgcagaau, AUGguaaaac, GCUgcaggug, GAAgcacgug, CAUguaaaca, UGGguaagau, AGGguagcua, AGGguggggu, CCUguaaguu, UGAgugaguu, GGAguaugua, CAGgugaccu, AAAguacgga, GAGguacaga, GAUguaggua, GGGguaauug, UAGguggguu, GUGguacgua, AAGguacagc, GAGgugaaga, GGGguaagca, UGAguagguc, GGGguaaguu, AUUgugaguu, UCAguaagac, AGUgugagcu, AAGgcaaaac, CUGgugaguc, AAGgucucug, GAGgcugugc, AGAgugagac, GAGgugaugu, AGAguauggu, UGGguggguc, GCUgcugagc, CAGguagcug, UAGgucagaa, CCGguaggug, GCAguaugau, CAGguuucag, GAGguuugcc, GGGguggggg, AAGguacaua, UGGguguguu, AGAguaaggc, GCGguuagug, AAGgugacuu, AUGguaagau, AUGguaguug, CAUguaagac, CUGguaugua, UUCguaagga, GAAguaugac, CGGguaauuc, UGGguaacuu, CAGgugccua, CAUguagggc, ACCgucagga, CGUguucgau, GAGgcaggac, UAGguaauau, UCGguauacu, UAGguugugc, CCGgugaguc, CAGgugccaa, CAGgugaugc, AAGgugagga, GUGgugaggg, UGGgucagua, GAGgucaggg, UAGguacgua, GAGgcaagag, CCUguuggua, GAGguaucca, UAAguaagcu, AAGgucaguu, AAAguuaaag, GAGgugcuau, ACGguaaguu, CUGgugaggg, GAGguuaugu, CUUgugugca, UGAgcugggg, AAGguauagu, UAGguaaaac, GGGgugaggu, GAGgcaagca, GGAguaacgu, AGAguaagua, AAAguaagua, GAGgcaacca, UGUguaaguu, UAGgugaggc, ACAguaagaa, UGAguaagug, CAAgucagua, AGGguaaaug, AAGguaugca, GCUgugcgug, GAGguucgcc, AAGgcuugca, CAGgcaagug, AUAguaaguc, UUGguaggua, GCAgcaggua, AAGguauauc, AGCguaagcc, CUGguucgaa, ACGgugggug, CUGgucauug, CAGgucagga, CAAgugagac, GAGguacugg, GAGguguagu, GAGguguccu, CAGgugcgua, AGUgcccuga, AUGgugaguc, UGUgugugua, CAGguaugcu, CUGguacagu, UUGguacgua, UCUguacgua, UAAguaauuc, CACguaugug, CAGgcaagua, UCGgugagug, GGUgugaguc, UCUguaagcu, AAGguucaga, AGGguacuuc, GCGgcagguu, GAGgcccgug, CAGguauaaa, AUGgucaagu, AAGgugagua, GUGguuuguu, AGAgugagga, GAGguaugac, UAGgcgugag, AAGguacucc, UGAgugagga, GAGguaugau, GGGgucggua, ACGguaugca, CAGguaccac, UAAguaccug, AGGgugggcu, CUGgucuguu, UAGgucagag, AAGguguguu, CUGgucagug, AAGgugggac, GUGguaguag, CUAguuuagg, CCCgccccau, GCUguacugc, GAGguaauau, UAGguuggug, AAGguccaac, UAGgugagga, GUGguaaguu, AGUgugagag, AAUguacaug, UUGgcaggug, UAGguuauug, CAGguacuga, GCGguggguc, UGUguaagau, GAGgugagua, GCAgccccgg, CAGgugcuaa, AGUguaagag, CAGguacauc, CAGgugggac, AGGguaaaua, UAAguaauua, CAGguaaccg, AAGguuugca, UAGgugguuu, CAGgugaccg, UGUguaagcu, GGAgugaguc, AGGguaggag, AGGgugggug, AAGgucugag, GAUguaauau, GGGguaauua, UAGguaggua, GAGgcaagua, GAGguaagga, UAGguacuac, UCGgugggug, AAGgugugga, CAGgucugcc, UAAgugagcc, GAAguaaguu, GAAguaagcc, UAGgugcgac, GAGguauggc, GCAguaagaa, CAGgugugga, UUGguaacgu, GCUguaaaaa, UUGguuagua, AUAguaaggg, UUGguacuag, CGGgcagccg, CAGgugcugg, UAUgugaguu, CAGgucuggg, UAAguaagaa, AAGguuauua, AGAguaaagc, AGAgugugag, UAGgugcgag, CAAguaaacg, AAGguacgua, CUGgugagua, CCAguaugua, UUGgugagug, UGAguaagua, GAGguuagca, GUGguaagcc, CUGguauggc, AAAguaacac, CAGguacuaa, UCUguaaguu, GAGgugaggg, ACUgugggua, GAUguuugug, CAGgugucaa, CAGgucacca, CCGgugagua, UUGguaaaua, CAGguggggg, ACUgcaggug, UAGguauguu, GGAgcaagug, UCGgugccuc, CAAguaacuu, GAGguaacca, CAGguaauau, GGAguaagaa, GAGguaccuu, AGGguaagga, CCUgugaguc, GAGguaaugg, AUGguguguc, GGGgugagua, AGGgucaggu, UGGguaaggg, AGGguagguu, AUAgugaguu, CCCguaggcu, ACAguaugua, GACgugugua, GCGgugagga, CAGgugaccc, UAAguuuagu, ACAguugagu, CGGgugaggg, CAGguggauu, CGGguagagg, UAGgugcgug, GGGguaagaa, GAGguggggu, CACguggguu, ACGguaauug, AGAgugaguc, UUGgcuccaa, AAGgugaugc, AAGguugguc, AGCguaaguu, AUUguaugua, UCAguuaagu, CAAguacgug, CAGgugcgug, CAGguaggua, AUGguggggu, AUGgugaguu, CAGguaauca, AAGguagggu, CAGgccaagg, GUGgugagag, AAGguuggug, CAGguacucu, UAGgcaugug, UUGguaccuu, CUGgugugcc, ACAguugcca, UUGguaauau, GAGgugcaug, UUGguuugua, UUGguaagug, UGUgugugug, GUGguuugua, GCGguacaca, AGAguaugcu, UUUguaagua, UCUgugcggg, AAGgucagug, GAGguaggaa, GCGguuagca, AGGgugaggg, GAAgugagua, CAGgugacag, AAGgugauua, GAGgccagcc, GAGgucuccu, UAGguauuac, CAUguaagag, CUGguagggc, GAAguaagua, CGGguaagug, CAGguaaucu, GUGguaggua, CAGgugggua, AAGgccagug, AAAgugaauc, ACGguuacgu, AUGguaggaa, CGGgugagac, GAGguuggaa, UGGgugagcc, CCAgugagua, CUAguacgag, CAGguaugac, GCUgugaggu, CUGguaugaa, GGUguacgac, CUUgugagug, GUGgugagca, CUGguaacuu, CAGguacuau, AGGguaaggg, UUGguuaguu, GGUguaagca, UCGgugagga, UGGguaaaca, UCGguacgug, UAGguagcag, CUGguaaggc, GUGguaagga, UAAguaagca, GAGguuccaa, CUGguaugga, GGGgugggua, CAGguuuccc, CAGgucucug, GAGgugagga, CUUguggguu, AUGgugagac, CAGgugaagg, GCGguagggg, GUUguuuccc, AAAgcaucca, GUGguagguu, AAGgugugaa, CAGguacagu, AAGguaccaa, UUGguaauug, AAGgugcuca, AAGguucaac, CAGguuuaca, GCUguaagug, AGGguauguc, GAGgucgggg, AAGgugccug, AAGguaaaaa, GUGgugaguu, UAGguaagaa, AGGguauccu, GUGguaauau, UCUguaagua, UGGguaugga, AUGguaugga, GACgugagcc, CUGguuuggc, AUGguauauc, AAAguaaacu, AGCgugagug, CUGguauaga, CAGgugggga, AGAguauguu, UAGguacuug, GCAguaggug, AGUguauguc, AAGguuaagc, CUGguggccu, GAAgugaguc, UUGguguaag, CAGguaagaa, CGGgucucgg, GAGgugcaca, CUCguuaguu, AAGgugauca, UAUguaagaa, GAGgugcuug, CAGgugguca, ACGguaaguc, ACAguaaugu, CCUguaaggu, GAGguuaagu, UCGguaugug, UGGguauguu, AAGguauuac, CAGgugaggg, UUGguaaaca, AAGguagugu, GAGguguggc, CAGguacgga, AAGgucauca, CAAguaggca, CAGgugaaac, CAGguacugc, AAUgcaagug, CAUguaauuc, AAGguaugcu, CUGgugaguu, CAGgugguuu, UGUgugagua, AAGgucggug, AUGguaaauu, AGGguauuac, AGUguaugga, AACguaagau, GUGguaaggu, ACUguuagua, CAGguaucag, AAGguuaguu, CUGgugagcu, UUGgugagcu, UGUguacgua, GAGgucagcc, GAGguagaau, AAGguaugag, UAGguauuuc, UGUguaacac, AGUguaaggc, GAGgucugcu, AAGguuagca, CAGguaaaug, AACguaagcu, CAGgucugca, CAGguauugu, GUGguaauuc, GAGguauaug, GCCgugagcc, GAGguaagag, UGAguaugua, CAGguaaggg, GAGguaaauu, CAGgcaacuu, UGUguaaguc, CAGgugcgcu, CGGguaaacc, CCGgucaguc, UAGgugggcg, GCGgucaguu, GGGguggguc, AGCguaauag, ACGgugaguc, CUGguacuug, CAGguuggua, AGAguaugug, CUGgugggua, GAGguggcuu, AUAguauuga, UGAgucgucc, CAGgugcucu, UACguaauau, GCUguccuga, CAGgcugcac, CUGgugcgcu, GCGguaagaa, UAAguuacuu, GAAgugagug, UAGgcaaguc, UAAguaaaua, ACGgugagug, CAGguagguu, GGGguauaac, GUUgugaguu, CAUgugagua, GAGgugcauu, AAGguuugua, UCGguaaugu, CGAguaaggg, GAGgcacgga, AGGgugugga, CAGguauggu, AAGguagaaa, CAGgugccug, UGGguauaug, UGAgugagac, UGGguaauuu, AUGguaaaua, AAGgcaaagg, AGUguuuguu, AUGguauugg, CUGgugaggc, UUGguaaaau, ACAgugaguu, CAGgugcugu, GAGguuaaga, AGAguaagaa, GAGguccgcg, GUGgugagga, CAGgugagcc, CAGgugacau, AUGgcaagcu, UCGguaauau, CAGgcaacaa, GGGguaggga, CUGgucucgc, UAGguaacga, CGGguaaggu, UAGguaaugc, CAGgcaagaa, ACAguaggua, CAAguaugag, GCUguucgaa, AAGguuaugc, GAUgugaguu, CAGguggaga, AGAguuaguu, UGAgugugcg, GAGguacagc, CAGguaagac, CAUgugcuuu, AGGguguguu, ACAguuaagg, ACAgugaggg, GAUguauacc, UUAguaagcu, CAGguaagau, AGAgcugcgu, GAGgcaaguu, GAAguaagug, AAGgugaaaa, AAGguaccua, GAGguaucag, AUGguaugua, AAGguaugaa, UUGgugagcc, AAGguuagga, AGGguaugua, CAGguaccga, AGAguaaacu, AAGgugcaua, AAGguaaugu, CCGgugugug, AGGguaaauu, GGGguuuggc, CAGguacacg, UUGguaacca, GAGgucaggu, UCUguuggua, CAGguuaguu, UUGguauguc, AAGgugcguc, AGGguaagaa, UUUguaagcc, AAGgucaggu, CUGguaaacu, UCGguaauuu, CUGguaggcu, GAGgucugua, GAGguacuuu, CUGguaaagg, CGGgugugug, CAGguguggu, UCGguacguc, CAGgugccag, GGGgugagaa, ACAgcuagua, AAGguauagc, CUGguaggag, GCUguacgua, AAGguaaagg, CAAgcacgag, CUAguaagac, CCCguaagcg, CAAgugugag, AUGguaaggg, AAGgugaggg, CAAguaggua, GGUguugcug, GAGguacugu, UAGguaagau, CAGgugcgaa, GAGguccagg, UUGguauaca, GGAgugagua, GAGgugagau, AAGguggggc, CAGguaaacg, UCGguaacuu, CAGguaaauu, GAGgugcgca, ACUgugagua, ACGgugugac, GUGguaaguc, CAGguaggca, CAGgucagca, GUGguaugug, AAAguaucug, CGGguaugua, AAGguaauaa, GAGgugggga, GCUguaggug, GAAgugaguu, AAAguauuua, UAUguaagua, ACGguaugag, CUGgugagug, AGAguaaaau, GCUguauggc, AUGguaaacc, GCAguaauaa, UAAguauuua, AAUgucagug, AUUgcaggag, CCGguaagaa, AAGgcaaguu, GAGguuuguc, AAGguaacug, AAAguaugag, GAUguuagua, CAGguggguc, AAGguaccga, CCAguaauua, GUGguaugcg, AUGgugcgcu, CAGgucuaug, AAGguauuua, CUAguaagau, AGAguaauuu, GAGguaacgu, AAGguagcca, CUGgucccgg, GAGguccuuc, ACGgucaccc, AAGguaauac, CAGgugcaug, AUGguaauag, UUUguaacac, UGGguaugau, CAGgcccccc, AGAguaguaa, AGUguaagaa, GAAguauguu, CAGgugugca, UUGgugaggg, UGGguugguu, CAGguacgua, GAGgugcggc, UCUguacggg, CGGgugcgug, UACguaagug, CAUguaagga, CAGgugacgg, GAUguaugcu, UCUgcaauuc, UGAguaaggc, GAGguauauu, AGAgugaguu, AAGguaagcu, UAGgugaagu, CAGguuagua, UAUguaagug, UUGguggggg, UGAgcucaaa, UCGguaugua, UAAguaugcc, AAUguaagua, CAGguuugca, ACGgugagag, CAGguguuuu, GUGgugagcc, AGGguacaua, UAGguaaccc, GUGgucagua, CUGgugagcc, CAGgugcuua, AUAgucguga, AUAgugagug, GAGgucaaaa, CGUguagcuu, CAGguguuug, CAGguuggac, CAGguaagcu, AGGgucagaa, CACguauguc, CACgugagug, GGGguacgga, AAGgcaggac, GAGgugaagc, GAGguuugaa, CAGguaagug, CAGguaacca, CAGguacucc, AAGgugcuuu, GAGguaaaua, GAGgcaggug, GAGguucgga, CAGguauuug, CAGguaaaua, CAGgugaugu, CAGgugauac, GAGgugaggc, AGGguggggg, UAAguaaguu, UGGgugaaca, UAGguacugc, CAGgcuccug, AGGguaggca, CAGgugcccg, GAGguacauc, AGGgugugug, AAGguaguaa, UGGguaugag, GGGgugugug, CUAguaggug, GAGgcaagga, AAGgcaagac, AAAgugcggu, AAGguugguu, GAGguuaaug, UUGgugaguc, UCGguuagcu, GCAguaagca, AAGgcaagca, ACAguaagcu, GAGguaacag, AAAguacgua, GAGguaauac, UUGguaggug, CUGguuaguc, GAGgugacgc, ACAguaagga, AAUguacuua, GGGguacagu, CGUguaugug, UCCguagguu, GAGguggucg, UCAgugaguc, AAAguaagca, GAGgucuggu, GAGguaauua, GUAguaagua, AAGgugggga, UCUgugagca, GAAguucgug, ACGgugaggc, UCAgugagua, UAGguaguug, GGUgucuggg, GGGguaagug, GAGguggguu, UGUgugaguu, CAUguaagua, AAGguaggug, AAUguaggag, GAGgcacguc, CAAguacauu, UUGguacaga, GAGguaguag, AAAgugaggg, UUGgucagug, AGGgugaguc, CAGgugaaca, GGUgugggcc, CGGgugagcu, GGGgugaguc, ACAgugagag, AGGgugaggu, GCUguaaguc, AUAguagguu, CAGgcaugug, AAGguaaguu, CAGguccgug, GAGgcaggua, AUGguggaag, AUGgugggcg, GAGgugagaa, AGUgugagca, UUGguaagua, CAAguaagca, GGUgugagcu, CCCgugggua, CAGguagaau, CAGgcugagc, CUGguggccc, UGAguaagag, CACguuagcu, AAGgugaguc, AAGguagcuc, UCGgugaguu, GAGgcccuuc, CAGguuaugc, CCUguaagcu, CAGgucuccu, UAGguaggcu, GGGguagggg, AAGguaguga, GAGguuguug, CAGguugguu, AAAguaagcc, ACAgugagug, UGGgugugau, CCCguaacua, AAGguguugc, AAAgcuggug, GAGguauagu, ACGguaagag, AUGguacggu, GAGgccaguu, GAGguaugcg, UCGgugggag, AAGguggaua, CCAguguggc, AGGguaagug, UCUguagguc, CAGgcaagga, CGGguaauuu, AUUgugaguc, CAGguaaacc, AAGgucaauu, AAGgugaaua, GUCguaagaa, GCGguaaguc, CUGguagagc, GAGgucgguc, CAGguaaaca, AAGgcaagga, CAGgucgucu, GGGguagggc, CUGguacuaa, GAGguagcug, CUUgucagcu, UAGguaaggc, CUGguauuac, UAAguacguc, AAGguaagcc, ACGgugaaag, CCAgccaaua, CAGguuuguc, AAGguauaau, AAGgucuuag, AGGgugagcu, AAGguuaggg, CGGguaaauu, CAGguaacgg, AGAgugugua, ACAguaaguu, GAUguaauuu, GAGguaggga, UUGgcaagug, AAAgugagga, AAGguagugc, AGAguaauuc, GGAguaaaua, GUGguaccca, CAGguauugc, GAUgugaggg, CAAguaaauc, CAGgugucuc, AAGguaacag, UUGguaaaag, CAGguaucau, ACGgugagac, CUGguaugac, CAGguucacu, GAGgugauca, AGUguaaguc, AACguaagua, AAAgugagug, GAGguacagg, CAAguaauga, GAUguaagga, UCAguucccc, GCGguaagga, UAGguacuaa, AAGgugaaag, ACUguaagug, UGGguaugug, AUGguaacag, CAGguagggu, ACAguaagug, AAGgugcucc, AAGgugugcu, AAGgugguga, ACGgugcgcc, AAGguauugc, GGGguaugug, CAGgugggcu, GAGguauguu, AACgugaaua, CAGguaaugg, UAGguaugau, CAGgcaggug, GGGguugguc, AAGguauggg, UAAgugaggc, CAAgugaucg, AAAguacggg, AGAgcuacag, GAGgugggaa, CAGguacuuu, GAGgugagag, CAGguagguc, UGGguacagc, AAGgugucag, AAGgcaagaa, GAGguaaaca, AAGguaaagu, AAGguaguca, CUGguauguc, GAGguauggg, AAGguauugu, CUGguacuga, GAGguaagcu, UGGgugggua, CAGguucgug, AAGguauggu, CAGgugagca, UGGguaaauu, UGUguaggug, UGUgugagcc, CUGguaauau, AAAguauguu, UGUguaagaa, CUAgugagaa, AGGguagguc, AAGgugggug, UCGguaagug, AGUguaaaua, GAUguaagug, AAGguuagug, UAGguaagca, CAAgugagaa, AGUguaagua, CAGgugaauc, UGGgugagac, AAGguagggc, CUGguuugug, GCGguagggc, GAGguaaucc, AUUguaauaa, CUGgugaaua, AAGguuuaaa, CCUguacugu, GCGgugagcg, AAGguaaucc, UAUgugagua, CCCgugagug, CAGgugcaga, CAGgucaguu, CAGguaggcu, AAAguaagug, UAGguugguc, CAGguugccu, AAGguaugga, GGUguggacg, AAAgugagaa, AGGgugagag, GAUguggcau, UCGguaaggu, GAGgugcguc, CGGgugaguc, AAGguacggg, GAGguucuug, AAGgugcuug, UAGguaugua, AUGgucagca, CGGguacuca, AGGgugagga, AUCgugagua, UCAguaagua, UAGguaaaua, AAGguaauug, GAAgucagug, CAGguacaaa, AAAguuaauc, AGCgugagcg, CCGgcuggug, AGUguaauuu, UGAgccacuc, GGGgucugua, AUGgcauguc, CGGguaaaga, AGGguagcau, CGGguaggag, GAGguucgug, UAAguuauuc, UAUguaagau, AAGguaguuu, CAGgugguau, GUGguaauga, AAGgugauuu, CAGgugaagu, GUAguaauua, AUGguuggug, CCAguaagug, UAGgugagag, AUGgugaggc, AAAguuagug, AAGgugccuu, UAGguaugag, CAGgugugac, CUGguggguu, AUGguaagga, UCUguaagaa, UCCgugaguu, AAAgcaggua, UAUgugagug, CAGguggagg, CAGguuagac, AUAguaagac, AAGguguugu, GAGgucugug, AAGguaagau, CAUguaaguu, CUGguaauua, CAGguaggcg, AGAguaaguc, UGGgugagga, AAUguaggua, UAGguuagca, GGGguaggua, GAGguauugc, AUUguacaca, GAAguaggua, GGAguaagcu, UAGguaugug, GAGgugaaua, GAGgugggau, AAGguaaucu, GGUgugaguu, AACgugaguu, GAGguaaccg, UAGguaagga, AUUguaagaa, UGGgugagca, AAGguaaggc, CCAguaucgu, CCGgugggug, GAGguagugu, ACGgugggaa, GAGgugaccu, CACguaugua, AGGgugggga, AAUguaaguc, AAAguuaagu, CAUgugagug, AGAguauguc, GCGguaugac, CGGgugaguu, CCGguauuuu, GAGguagaac, UAGguaugaa, CAGgcgcgug, CAAguaaguc, AGUguaagau, AAGguucuac, CCAguaagua, GAGguagcag, CAGgucuguu, CAGguacaau, CCGguaaaga, UAAgugcugu, AGGgugagaa, CUCguaaggu, CAGgucagcu, CAGguaaggc, AGGgugcagg, GAGgugaaac, AGGguaagua, AAUguaugcc, AAGguaagca, ACGguacggu, AAGguaauga, UCUgcucaau, ACGguaaugu, AAGguaguug, ACGguaagug, CAGgugauga, GAGguaacac, GAGguaggua, CAGguaccuu, CAGguaauaa, UUGgugggug, CUGguaauga, UAGguaaguc, AGGgugugac, GAGgcaauaa, GUGguaaagc, CUGgugggcg, GAUguauguu, AGGgugagac, UCGgucagca, AUGgugauua, CGAgugugua, CAGguuggug, AGCgcaagua, UGGguacguu, GAGguauuug, AGUguacaua, AUGguaagua, ACAguagguu, AAGgugagag, UUGgugaagu, AAAguaugua, UGGguaagga, UAGgugccuu, and CCUgugggug.

[0465] Additional exemplary gene sequences and splice site sequences (e.g., 5′ splice site sequences) include UCCguaaguu, GUGguaaacg, CGGgugcggu, CAUguacuuc, AGAguaaagg, CGCgugagua, AGAgugggca, AGAguaagcc, AGAguaaaca, GUGguuauga, AGGguaauaa, UGAguaagac, AGAguuuguu, CGGgucugca, CAGguaaguc, AAGguagaau, CAGgucccuc, AGAguaaugg, GAGgucuaag, AGAguagagu, AUGgucagua, GAGgccuggg, AAGguguggc, AGAgugaucu, AAGguaucca, UUCguaagua, UAAgugggug, GCCgugaacg, GAGguugugg, UAUguaugca, UGUguaacaa, AGGguauuag, UGAguauauc, AGAguuugug, GAGgucgcug, GAGgucaucg, ACGguaaagc, UGAguacuug, CGAgucgccg, CUGguacguc, AGGguauugc, GAAgugaaug, CAGaugaguc, UGGguauugg, UGAguaaaga, GUGguuccug, UGAgcaagua, UAUguaagag, AAGgucuugc, AAAgcaugug, AGAguacagu, GUGguaaucc, CAGguagagg, AAGguacaac, UGGgcagcau, CCGgucauca, CCGguuugua, UGAguaaggg, GAAguaugua, GGGguagcuc, GCUguacaua, CUGgucucuu, GUGguaaaug, AUCguaagug, GAGgcaugua, AAGgucuccc, UGGgugcguu, UGUguagguu, GAAgugagca, GGUguaauuu, CUGgugaaau, AUCguaaguc, AGAguaaucc, GGAguagguc, GAGguaccaa, CUUguaggug, AAGguauaag, AGAguuggua, AUGguuugug, UGGgucagau, AGAguaggac, AGAguagugu, AGAguaggag, CAGgucucua, AAGguggaug, UGGguaucaa, GAUguaugga, AAGguguuuc, GCAguguaaa, UUAguaugua, UCUguaugca, AAUguaaaau, AGAguaaauu, GGGguacuuu, GAAguuugau, AAAguagauu, UGUguagagu, UGGguaagcg, CGGguucagg, AGGguacgac, UCGguaagaa, AGGguuggca, AAAguacagu, UAAguuaagg, AUGguaaugu, GUGguuuuac, AGAguaacaa, AAGguagccc, GCGgugaggc, AUGguucagc, AAGguacuua, AAGguccgug, UAGguaagcg, AUGguaccuu, GCCguggugg, CUGgugcguc, CAGguggaaa, AAAgucugua, GAGguaaccc, AGAguauggg, UAUgccccug, AAGgugccag, ACGgugcggc, AGGguacuga, AGAguaagcg, CUGgcaaggg, CCAgugugug, GAGguagacg, CGGgugcggg, GAUguaagcu, AUUguauuua, UGCgugagug, CUGgucuaua, GAGgugcuag, GAGgugccau, CAGguacguc, GAGguucagc, AACguaagaa, AGAguaguac, AAGguaacgg, UAGgugugac, CCGguaauag, CAGguaccag, UUUguaauug, AAUguacgaa, CAGguaauga, AUCgucaagg, CUGguagaug, GGGgugcagu, AGUgugagaa, GGGguuuuau, CCUguccccu, AUUgugaagu, AAGguaaacg, UACgucgugg, AAGgugccau, GGGgucccag, UAUguauggu, CGGguaauua, CGGguacucc, CAGgugacuu, AGUguggguu, AGAguauggc, AAGgccaaca, AAAgcaagua, UCAguagguc, GUGguggcgg, CAUguauccu, UCGgugagcc, AUAguugggu, AAUguuagcu, AUGgugaaug, CGGguaaugu, UCUguaggug, CCGgugaggc, UGAguccacu, CUAguaagag, CGGguggggc, CGAguaagca, UGUgccaauu, UCGguaagcc, UAUguaggug, UUGgugggcc, GAGgcugggc, AGAguaacuu, ACGguagguc, CAGgcccaga, CCGguggguu, AAGgugacgg, GGGguacagc, CAUguaaguc, AUUgugagaa, UGUguaagga, UUUguaagau, AGGgucauuu, UGGguuuguu, CGAguaagcc, GUGgugugua, AUGguauaac, UGGguacgua, AAAguagagu, UCGguaacug, AGAguaauga, AUGguggguc, AGAguaauau, CAGguacugg, UAAgucaguu, GCGguagaga, AAGgugaugg, ACAguauguu, GAUguacguc, UAGguuucuc, GAGgcauggg, AUAgcuaagu, GUAgucugua, AAGgugaacg, GUGguggucg, GAGguugauc, UGAguggguu, ACUguacgug, CUGgugacug, CAAguuaagc, GAGguaccca, AACguaacuu, CAGguuacua, AGAguuaguc, UGGgcacguc, AGUguauggu, AAGguugcaa, CAGguuguua, AAGgcauccc, GAUguaaggc, AGGguacggg, GAGgucaaag, CAAgugagcg, AGAguaaucu, UCGguagcug, AAAguaguag, CAGguucguc, CGUguaugaa, AGUguaaaaa, AAGgucucac, UAGguggagc, UGAguaggug, AGAguaugcc, GAGguugcau, CAAguaagag, UCUgugugcc, GAGgugaugc, GGGgugauaa, CCCgugagcc, AGAguaacug, GCGguaagua, AGAguacauc, UCGgucuggg, UAAguaucuc, GGCguagguu, AGAguacgcc, GAUgucuucu, AGGgcaaggu, CGAguaugau, AUGguagagu, CAAguacgag, UCGguaugau, CCGguguguu, AGGgucugug, GGAguaggcu, AAGgucuaug, GCAgugcgug, UGGgugagaa, AGGguaaagu, GAGguaggac, CUAguaagca, UUAguaggcu, CUGgugggau, CUGguuagua, AAGguacgug, CGGgugagau, AAGgugcaug, AAUgugggcu, CAGguugacu, CAGguuacag, GCGguaacau, AUUgucaguc, CAAguauaca, GAUguccgcc, AAGgugcgga, AACguaagag, UGGguuggua, CAAguguaag, GUGguaacgu, CUGgugauca, AGGguggggc, UCGguaaaga, CAGguacacc, CGGguaaggg, CAAguuugcu, ACAgugcgug, UUGguauggg, GAGgcucauc, CUGguaauag, AUGguggaua, UCAgugaauu, AAUguaauua, GCAgucuaaa, AAGguauucu, GAGgucauca, UGGguccaug, AGAguuugua, AGGguagacu, AAGguaggac, UGUguguuga, UCAguacgug, AUGgucucuc, UGAguuagua, UGAguaaagu, GAGgugaccg, GAGguauauc, CAGgugccau, AGAgugguga, GUUguaagaa, AGAguaaaua, AGGgugaagg, CUGguagauu, GAGguucagg, AGGgucuuca, CUGguaaccu, ACAguacuga, AGAguggguc, AUGguaugag, AAGguuauau, AGAguauagu, AAAguaugaa, UAGguggcua, ACCguauggg, AAAguauaau, UUUguauggc, GGGgucgcgu, GUGgugguuu, CAGguuugac, GGAguaggcg, GAGguacccu, AUGgugugca, GUGguuggug, AAAguaugcu, UAAguuacau, ACAguaugag, GGAguauguu, UUUgugagaa, AAUgugcguu, CAGguagagu, AUGguguuaa, CAUgugcguc, AUAguuggau, GAGguacgua, GUUgugagaa, CAAguacauc, GAGguaguuu, ACUguacaga, CCGguuguga, UGGgucagug, GUAguaagaa, GACguacuuu, AGAgucaguc, UAGguuaguu, AGGgcagcag, AAGguccuac, AAUguaauug, CAGgugcggg, CUGguaaugg, CAAguagccc, GAAgucaguu, ACAguaauug, UUAguuagua, CCUguauuuu, AUCguaagaa, CCAgugagca, GAAguaaggc, UGAgugggua, UCAgugguag, UCUguacagg, CGAgugagug, UCCguaugug, CAUgccguuu, AAAgugacuu, AGAguaggca, GAAguaagag, CAGgcagguu, UUGguagagc, AAGguggaaa, GAGgcagguc, AUGguacgac, AGGguaggaa, AGGguaggua, UUGguaaggu, AUGguacaga, CAGguagagc, UAGguaaggu, GGGguuagag, AAGguaucaa, GAGguagccc, CAGgugccuc, GCAguaagag, ACGguagagu, UGGguaaugg, CUGgucaguu, GUGguacauu, AAAguagguu, AAGgccaaga, CGGgugggca, ACGguccggg, CGAguaugag, CUGguaugcc, GAGguggaug, CAGgccuuuc, AAAguacauc, AAAguaauca, GAGguaacug, CUGguaaaga, CGUguaagca, UGGgcaagua, GCGguggcga, GAGguggccg, AUUgcaugca, ACGgugacug, CAGgucagau, AGAguaacuc, UGAguaacag, AAGguacccg, AGGguaggcu, GGGgcaggac, CCUguaagug, AUUguaagug, ACUguacgag, GUAguagugu, AGAguaugag, UCAguguggg, UGGguauaua, UAGguagcua, GGGguaaaga, AGGguuacuu, CAUguaaaug, GGAguaguaa, CAGgucaauc, CGGguuagug, UAGguacaug, UAGguuaaga, UGGguaccuu, CGGguggaca, CAGgucuuac, AAGguggagc, AUGguaacca, UCGguaaguu, UAUguacaaa, AAUguagauu, GUAgcuagua, AAGguauugg, GAGgucuuug, GAAguucagg, UGGguaucac, AGAguacugg, CAGguuaaug, AGGguacgug, AGGgcacagg, CUGguuaguu, UUGguacgag, ACGgugauca, CCUgugagag, GAGgugaagu, AAGguacauc, UCUguaugug, UUGguggaag, UGGgcagguu, GAAguggagc, ACAguaagac, CGGguaccaa, CAAguacguc, AGAgugaggg, CGGguaagaa, AAUguaggug, AUCgugugcu, UAGgucaugg, CAGguuuuga, AAGgcaugca, GAGgugcugc, AAGguuaaua, CAGguucauc, GCGguaggug, GACgugagua, CAGgucuacu, UUGguaugag, AGCgugggca, AUGguaaggu, AUGguaccuc, UUGguauggu, UAUguaugaa, UGGguauggg, GAUguaaaua, CCGguaaguu, GAGgucugaa, GAGgugcgag, CUGgucagcc, CAGguuuugu, CGGguggugu, UAAguuagua, UUUgugugug, CAGguuaacc, UUGguacuuu, GCUguaaggc, AGGguggcug, GAUguaaaaa, AAGgucaaaa, CAGguagcgc, CAGguuuggc, GAGgugguuu, CGGguaaaua, CUGguucggu, GGAgugagcc, AAGgugcgcg, GAAguacauc, AGUgucugua, CCCgugagcu, GAGguucaca, CUAgugggua, GAGguaacua, UCGguauguc, UAAguauuug, CAGguaagcg, GAGgugguaa, CGAguaagag, CCGguaagcu, GAGgucuugu, AAGguggguc, CACguaagug, AGUguaauga, AAAgugugua, GGAgugccaa, CACgugaguu, AAGguuggau, UAUguaaaua, CUGguaggaa, UAUguaaacu, AAUguauuuu, CUGgcaagug, UGUgugguau, UAUguauguu, UUGgugacuc, GGAguaaggu, AAGguagaug, UGGguagggu, AAUguaauuc, GUGguauggc, GGAguggguu, AGGguaccac, UAGgugacag, ACAguaggca, AUGguuugaa, GCAguaacua, CCGguaggua, AGAguaggcc, AAGguugaca, CUGgugugua, GAAgucuguc, UGGgcucgga, CAGguagccu, AGAguaggua, UAAguauguc, CUGguauauc, GAGguguguu, AUGgugcaug, AAGguacgcc, UGAguaacua, GAGgugacag, GUUguccugu, UUGgugucuu, AAUgugaagg, UUGguggaua, UAGguguguu, CUGgcaaguu, GCAguaagau, GCGguggaaa, UGCguccagc, AAAguggagu, CGUgugagcc, AGAguacugu, CAGguauagc, UACguaagga, AAGgucuuua, AAGguggucu, GGGguaaauu, UCAgugagga, AGAguacguu, GAGgucguca, UAGguuugau, CAUguaaacc, AAGguggcac, CAGguagaug, AACguaaaag, UAGgucucug, AUAguaggug, UAGgcaagag, UAGgcacggc, AAGgucuuca, CCAguaugcu, CAAgugaguu, CAGgucucaa, CAGguuacau, GGAgugagca, AGAguacgca, CUGguguugg, AAGguacuca, CUAguaaggg, AGAguaaaag, AAGguaacga, CUGguccccg, UAAguauggg, GAGgucgagc, UUGguauaua, AAAgucaagg, AAGgucuagg, CGAguagguc, AGGguucguu, GAGgcaggcc, CUAguauuac, ACGguaugug, UAGgugguuc, AGAguauaac, UUGgugcguc, ACCguuaucu, CCAgugauga, GAAguaugca, GAAguauggc, CCGguaggac, AAUguaagca, AGAguaauug, AGGguugguu, GUGguaggag, AAGgcaguuu, CAAguaagcc, CUGgcaagua, CAGgcaugau, AGGguaauug, GGGguaaccu, AAAguaacua, UAGgucugcc, ACGguaugaa, AGUguauggg, UGGguuggca, UAGguaaacu, AGAgugggua, AGAguauuug, AGUguaggaa, CUUguacgua, GAUgugagau, CAGgcagcca, AAGgucacug, AAGgucugac, UAGguuccuu, CUGgugcuuu, UGAguuggug, UUGgugggau, UGAguagggu, UCGgugaggu, AAAguaaaga, AAGgcaaguc, CGGguaaagc, AAAguuaguu, UUAguaagca, GAGgucacau, UAAgugguau, UAGgugcuuu, GGAguaggca, UGAguaagga, CAGguggagc, GAUguagaag, AAUgccugcc, AUGguaaggc, UGGguaauau, CUGguaccuc, CACgugagcc, UGAguuugug, CCGguagugu, AAAgugacaa, GAAguggguu, CAGgugcagc, GAGgugggcc, UAUgugcguc, GGGguacugg, CUGguagguu, UUGgcauguu, AAUguaauac, UAGgccggug, AGAgucagua, UAAguaaauc, CAGguuccuc, UAGguacgau, AGAguuagug, GCAguaagug, AGGgugguag, GGAguaaugu, GAUguaaguc, CCAguuucgu, AAGguucggg, AUGguggagu, AAGguaccgg, GAAgugcgaa, UGGgucaguu, AAGguguaga, UGGguaggcc, CCAgugaguc, AAGgucacuu, AGCgugaggc, UCCgugguaa, AGAguacuua, GGGgucagau, AAGguggacc, AGAgugagcg, AGAgucagau, UAAguauuac, AGAguauuuc, AGAguucagc, AUGgugaagu, UAGgugaucc, GGAguaagau, UAGguaccaa, AGAguugguc, GAAgugagac, AUCguagguu, GAGguacgcu, ACGguaaggg, CAGgcauguc, UUAguaagau, UGAguagguu, AGGguacgaa, ACGguauguu, AGGguacugu, UUGguaugga, UAAguaacug, GCGgucagcc, UUUgugaguc, GUGgucagug, CUGgucugua, GAGguucuua, AUGguacuga, AAUgugcuuu, AGGguggcgu, CCGgcaggaa, CAUguggguc, UUGguuuguu, CAGguucugu, ACGguaagcg, CUGgucagua, UCAguaggcu, UGAguaggac, CAGguuuuaa, GAGguguccc, AGGguggguu, GUGgugagac, CACguaggga, GUGguauuuu, GAGauauccu, AAGgugaaca, UAAguagggc, CUGgugcggg, CUGgucaaua, AGAguaaaaa, AAGgugcagu, CGGguaagca, AAAgugagcc, AUGguaauca, GCAguacgug, AUGguacaug, AAGguuaaga, CGGguaaaug, GAGguucgca, GAGgcucugg, AUGgugggac, AACgugguag, AAGgugauag, GGGguuugca, CAUguaaggg, UCAguugagu, AAAgugcggc, AGAgugagcc, AUGgcaagaa, ACAguaaggu, AAGgucucua, GUGguaaaaa, AAAguaggug, UAGgugcacu, GUCgugguau, CAGguauagg, UGAgugagag, ACUgugagcc, AUCguuaguu, UUUguaccaa, UGGgugagau, AGAgugagaa, AGAguagggg, AGGgcaagua, CGGgucagua, UUGguaugcc, CGGguuagau, GGGgugaagu, CCCgugugaa, GCAguuugga, UGCguaagac, AGAgucugua, CACgugagca, AGGguaaaag, CAGgcugggu, GAAgucuuca, AAGgcaaaaa, GUAguaaaua, CUAgugagag, GAAguuucug, CCUguacgua, GAGgugcgcg, AAGguguaaa, CCAguauguu, CCGgucagcu, AUGguuccug, CAAguuaaau, AGAguaggcu, AUGgugggca, GGAguaagac, AGGgucacga, UAGgugauau, GAAguaaguc, CGGguaagau, CAAguagcua, UGAguaaaau, GUCguacgug, AUGguacgua, CAGgucucgg, GAGgcauguc, AGAgugggau, GUGguuagag, UGGgugguga, AAGguuaaac, CUUguuagcu, AAAguaggaa, UAGguuguau, AGGgugcgcc, AAGgugggcu, UAAguaucug, AAGguaacgu, AUGguggggc, CAAguacacg, GGCguaagug, AUAguaggac, AGAgugaggu, UUUguaaaaa, GAAguuugua, CUAguaaucu, AAGguuuuua, GAGgugcguu, UAGgcgagua, ACCgugagua, CAGgucccga, AUGguacugg, UGAguucagu, AAUguguggu, UCCguugguu, CAGgucagag, CAGgucccua, UAGguagacu, CAAguuaagg, GAGgugugcg, GAAgcugccc, CGAguacgug, CGGguaggua, UUGguauuga, AUUguaugau, UUGguaugaa, GAGgugguca, GCUguaugaa, CAGguguugc, CAGguaaaac, AUAguaaggu, CUGguuagag, AGCgugugag, AAGguuaucu, CACgugagua, AGGgucagua, GAGguauaau, CAGguuauuu, AGGguggacu, AUUguaauuc, UUUguggguu, AUGguacgug, AAGguguucc, CAGgugacgc, GAGguacuaa, ACAguucagu, GAGgucacgg, CAAguaaggc, AAGguuuggg, AAAgugggcu, GCGguucuug, GAGguggagc, UGAgucagug, CAGgucaagg, AGUguaagcu, GAGgcagaaa, AAGgucacac, GAAguagguu, GUCguaaguu, AGAguaugca, CCUgugcaaa, ACGgugaaaa, CAGguacgaa, CAUgugagga, AGCgugagua, GGUguguagg, AACgugagcu, GAGgugaacu, AGAguucagu, AACgugugua, CAGguugugg, AAGguacuag, UCAgugaaaa, AAUgucuggu, ACGguaaaau, CUGguguaag, GAGgugcgaa, AGGguuucuc, CAGguagccc, AUUguauugg, AUGguacuua, GAGgcccgac, UCGguaagac, CGGgcuguag, UAUgugugug, UAGguagaaa, GUGgucauua, UAGgugaaag, ACUguaauuc, GCAguacagg, UCGgugaguc, UAUguaggga, AUGguauguc, GUGgugugug, CUGgugaccu, AAUgugaaua, UAGgucucac, GAGguuauug, UGAguaggcu, CGGgcacgua, GCAguaaaua, CCGgugagag, UAAguugguc, CCGgugagcc, AAGguuguca, CUGguauuau, GGGguauggg, AAAgucagua, UUUguaugua, UAAguacugc, CAGguaccaa, GAAguucaga, AUGgugcggu, GUGgugaggu, UGAguaagcc, UAUguaaggg, GUGguggaaa, GAGgugauug, GGAguuugua, AAGgucacga, GUGguagagg, UAAguauauc, AAGgugucca, UAUgugguau, GAGguacaau, AAGguggggg, GGAguaggug, and UAGgugacuu.

[0466] In some embodiments, the splice site sequence (e.g., 5′ splice site sequence) comprises AGA. In some embodiments, the splice site sequence (e.g., 5′ splice site sequence) comprises AAA. In some embodiments, the splice site sequence (e.g., 5′ splice site sequence) comprises AAC. In some embodiments, the splice site sequence (e.g., 5′ splice site sequence) comprises AAU. In some embodiments, the splice site sequence (e.g., 5′ splice site sequence) comprises AAG. In some embodiments, the splice site sequence (e.g., 5′ splice site sequence) comprises ACA. In some embodiments, the splice site sequence (e.g., 5′ splice site sequence) comprises AUA. In some embodiments, the splice site sequence (e.g., 5′ splice site sequence) comprises AUU. In some embodiments, the splice site sequence (e.g., 5′ splice site sequence) comprises AUG. In some embodiments, the splice site sequence (e.g., 5′ splice site sequence) comprises AUC. In some embodiments, the splice site sequence (e.g., 5′ splice site sequence) comprises CAA. In some embodiments, the splice site sequence (e.g., 5′ splice site sequence) comprises CAU. In some embodiments, the splice site sequence (e.g., 5′ splice site sequence) comprises CAC. In some embodiments, the splice site sequence (e.g., 5′ splice site sequence) comprises CAG. In some embodiments, the splice site sequence (e.g., 5′ splice site sequence) comprises GAA. In some embodiments, the splice site sequence (e.g., 5′ splice site sequence) comprises GAC. In some embodiments, the splice site sequence (e.g., 5′ splice site sequence) comprises GAU. In some embodiments, the splice site sequence (e.g., 5′ splice site sequence) comprises GAG. In some embodiments, the splice site sequence (e.g., 5′ splice site sequence) comprises GGA. In some embodiments, the splice site sequence (e.g., 5′ splice site sequence) comprises GCA. In some embodiments, the splice site sequence (e.g., 5′ splice site sequence) comprises GGG. In some embodiments, the splice site sequence (e.g., 5′ splice site sequence) comprises GGC. In some embodiments, the splice site sequence (e.g., 5′ splice site sequence) comprises GUU. In some embodiments, the splice site sequence (e.g., 5′ splice site sequence) comprises GGU. In some embodiments, the splice site sequence (e.g., 5′ splice site sequence) comprises GUC. In some embodiments, the splice site sequence (e.g., 5′ splice site sequence) comprises GUA. In some embodiments, the splice site sequence (e.g., 5′ splice site sequence) comprises GUG. In some embodiments, the splice site sequence (e.g., 5′ splice site sequence) comprises UCU. In some embodiments, the splice site sequence (e.g., 5′ splice site sequence) comprises UCC. In some embodiments, the splice site sequence (e.g., 5′ splice site sequence) comprises UCA. In some embodiments, the splice site sequence (e.g., 5′ splice site sequence) comprises UCG. In some embodiments, the splice site sequence (e.g., 5′ splice site sequence) comprises UUU. In some embodiments, the splice site sequence (e.g., 5′ splice site sequence) comprises UUC. In some embodiments, the splice site sequence (e.g., 5′ splice site sequence) comprises UUA. In some embodiments, the splice site sequence (e.g., 5′ splice site sequence) comprises UUG. In some embodiments, the splice site sequence (e.g., 5′ splice site sequence) comprises UGU. In some embodiments, the splice site sequence (e.g., 5′ splice site sequence) comprises UAU. In some embodiments, the splice site sequence (e.g., 5′ splice site sequence) comprises GGA. In some embodiments, the splice site sequence (e.g., 5′ splice site sequence) comprises CUU. In some embodiments, the splice site sequence (e.g., 5′ splice site sequence) comprises CUC. In some embodiments, the splice site sequence (e.g., 5′ splice site sequence) comprises CUA. In some embodiments, the splice site sequence (e.g., 5′ splice site sequence) comprises CUG. In some embodiments, the splice site sequence (e.g., 5′ splice site sequence) comprises CCU. In some embodiments, the splice site sequence (e.g., 5′ splice site sequence) comprises CCC. In some embodiments, the splice site sequence (e.g., 5′ splice site sequence) comprises CCA. In some embodiments, the splice site sequence (e.g., 5′ splice site sequence) comprises CCG. In some embodiments, the splice site sequence (e.g., 5′ splice site sequence) comprises ACU. In some embodiments, the splice site sequence (e.g., 5′ splice site sequence) comprises ACC. In some embodiments, the splice site sequence (e.g., 5′ splice site sequence) comprises ACG. In some embodiments, the splice site sequence (e.g., 5′ splice site sequence) comprises AGC. In some embodiments, the splice site sequence (e.g., 5′ splice site sequence) comprises AGU. In some embodiments, the splice site sequence (e.g., 5′ splice site sequence) comprises AGG. In some embodiments, the splice site sequence (e.g., 5′ splice site sequence) comprises CGU. In some embodiments, the splice site sequence (e.g., 5′ splice site sequence) comprises UAC. In some embodiments, the splice site sequence (e.g., 5′ splice site sequence) comprises UAA. In some embodiments, the splice site sequence (e.g., 5′ splice site sequence) comprises UAG. In some embodiments, the splice site sequence (e.g., 5′ splice site sequence) comprises CGC. In some embodiments, the splice site sequence (e.g., 5′ splice site sequence) comprises CGA. In some embodiments, the splice site sequence (e.g., 5′ splice site sequence) comprises CGG. In some embodiments, the splice site sequence comprises AGAguaaggg.

[0467] In an embodiment, a gene sequence or splice site sequence provided herein is related to a proliferative disease, disorder, or condition (e.g., cancer, benign neoplasm, or inflammatory disease). In an embodiment, a gene sequence or splice site sequence provided herein is related to a non-proliferative disease, disorder, or condition. In an embodiment, a gene sequence or splice site sequence provided herein is related to a neurological disease or disorder; autoimmune disease or disorder; immunodeficiency disease or disorder; lysosomal storage disease or disorder; cardiovascular condition, disease or disorder; metabolic disease or disorder; respiratory condition, disease, or disorder; renal disease or disorder; or infectious disease in a subject. In an embodiment, a gene sequence or splice site sequence provided herein is related to a neurological disease or disorder (e.g., Huntington's disease). In an embodiment, a gene sequence or splice site sequence provided herein is related to an immunodeficiency disease or disorder. In an embodiment, a gene sequence or splice site sequence provided herein is related to a lysosomal storage disease or disorder. In an embodiment, a gene sequence or splice site sequence provided herein is related to a cardiovascular condition, disease or disorder. In an embodiment, a gene sequence or splice site sequence provided herein is related to a metabolic disease or disorder. In an embodiment, a gene sequence or splice site sequence provided herein is related to a respiratory condition, disease, or disorder. In an embodiment, a gene sequence or splice site sequence provided herein is related to a renal disease or disorder. In an embodiment, a gene sequence or splice site sequence provided herein is related to an infectious disease.

[0468] In an embodiment, a gene sequence or splice site sequence provided herein is related to a mental retardation disorder. In an embodiment, a gene sequence or splice site sequence provided herein is related to a mutation in the SETD5 gene. In an embodiment, a gene sequence or splice site sequence provided herein is related to an immunodeficiency disorder. In an embodiment, a gene sequence and splice site sequence provided herein is related to a mutation in the GATA2 gene.

[0469] In some embodiments, a compound of Formula (I), (III), or (V) described herein interacts with (e.g., binds to) a splicing complex component (e.g., a nucleic acid (e.g., an RNA) or a protein). In some embodiments, the splicing complex component is selected from 9G8, A1 hnRNP, A2 hnRNP, ASD-1, ASD-2b, ASF, BRR2, B1 hnRNP, C1 hnRNP, C2 hnRNP, CBP20, CBP80, CELF, F hnRNP, FBP11, Fox-1, Fox-2, G hnRNP, H hnRNP, hnRNP 1, hnRNP 3, hnRNP C, hnRNP G, hnRNP K, hnRNP M, hnRNP U, Hu, HUR, I hnRNP, K hnRNP, KH-type splicing regulatory protein (KSRP), L hnRNP, LUC7L, M hnRNP, mBBP, muscle-blind like (MBNL), NF45, NFAR, Nova-1, Nova-2, nPTB, P54/SFRS11, polypyrimidine tract binding protein (PTB), a PRP protein (e.g., PRP8, PRP6, PRP31, PRP4, PRP3, PRP28, PRP5, PRP2, PRP19), PRP19 complex proteins, RBM42, R hnRNP, RNPC1, SAD1, SAM68, SC35, SF, SF1/BBP, SF2, SF3A complex, SF3B complex, SFRS10, an Sm protein (such as B, D1, D2, D3, F, E, G), SNU17, SNU66, SNU114, an SR protein, SRm300, SRp20, SRp30c, SRP35C, SRP36, SRP38, SRp40, SRp55, SRp75, SRSF, STAR, GSG, SUP-12, TASR-1, TASR-2, TIA, TIAR, TRA2, TRA2a/b, U hnRNP, U1 snRNP, U11 snRNP, U12 snRNP, U1-70K, U1-A, U1-C, U2 snRNP, U2AF1-RS2, U2AF35, U2AF65, U4 snRNP, U5 snRNP, U6 snRNP, Urp, and YB1.

[0470] In some embodiments, the splicing complex component comprises RNA (e.g., snRNA). In some embodiments, a compound described herein binds to a splicing complex component comprising snRNA. The snRNA may be selected from, e.g., U1 snRNA, U2 snRNA, U4 snRNA, U5 snRNA, U6 snRNA, U11 snRNA, U12 snRNA, U4atac snRNA, and any combination thereof.

[0471] In some embodiments, the splicing complex component comprises a protein, e.g., a protein associated with an snRNA. In some embodiments, the protein comprises SC35, SRp55, SRp40, SRm300, SFRS10, TASR-1, TASR-2, SF2/ASF, 9G8, SRp75, SRp30c, SRp20 and P54/SFRS11. In some embodiments, the splicing complex component comprises a U2 snRNA auxiliary factor (e.g., U2AF65, U2AF35), Urp/U2AF1-RS2, SF1/BBP, CBP80, CBP 20, SF1 or PTB/hnRNP1. In some embodiments, the splicing complex component comprises a heterogenous ribonucleoprotein particle (hnRNP), e.g., an hnRNP protein. In some embodiments, the hnRNP protein comprises A1, A2/B1, L, M, K, U, F, H, G, R, I or C1/C2. Human genes encoding hnRNPs include HNRNPA0, HNRNPA1, HNRNPA1L1, HNRNPA1L2, HNRNPA3, HNRNPA2B1, HNRNPAB, HNRNPB1, HNRNPC, HNRNPCL1, HNRNPD, HNRPDL, HNRNPF, HNRNPH1, HNRNPH2, HNRNPH3, HNRNPK, HNRNPL, HNRPLL, HNRNPM, HNRNPR, HNRNPU, HNRNPUL1, HNRNPUL2, HNRNPUL3, and FMR1.

[0472] In one aspect, the compounds of Formula (I), (III), or (V) and pharmaceutically acceptable salts, solvates, hydrates, tautomers, stereoisomers, and compositions thereof, may modulate (e.g., increase or decrease) a splicing event of a target nucleic acid sequence (e.g., DNA, RNA, or a pre-mRNA), for example, a nucleic acid encoding a gene described herein, or a nucleic acid encoding a protein described herein, or a nucleic acid comprising a splice site described herein. In an embodiment, the splicing event is an alternative splicing event.

[0473] In an embodiment, the compound of Formula (I), (III), or (V) or a pharmaceutically acceptable salt, solvate, hydrate, tautomer, stereoisomer, and compositions thereof increases splicing at splice site on a target nucleic acid (e.g., an RNA, e.g., a pre-mRNA), by about 0.5%, 1%, 2%, 3%, 4%, 5%, 6%, 7%, 8%, 9%, 10%, 15%, 20%, 25%, 30%, 35%, 40%, 45%, 50%, 55%, 60%, 65%, 70%, 75%, 80%, 85%, 90%, 95%, or more, e.g., as determined by a known method in the art, e.g., qPCR. In an embodiment, the compound of Formula (I), (III), or (V) or a pharmaceutically acceptable salt, solvate, hydrate, tautomer, stereoisomer, and compositions thereof decreases splicing at splice site on a target nucleic acid (e.g., an RNA, e.g., a pre-mRNA), by about 0.5%, 1%, 2%, 3%, 4%, 5%, 6%, 7%, 8%, 9%, 10%, 15%, 20%, 25%, 30%, 35%, 40%, 45%, 50%, 55%, 60%, 65%, 70%, 75%, 80%, 85%, 90%, 95%, or more, e.g., as determined by a known method in the art, e.g., qPCR.

[0474] In another aspect, the present disclosure features a method of forming a complex comprising a component of a spliceosome (e.g., a major spliceosome component or a minor spliceosome component), a nucleic acid (e.g., a DNA, RNA, e.g., a pre-mRNA), and a compound of Formula (I), (III), or (V) or a pharmaceutically acceptable salt, solvate, hydrate, tautomer, stereoisomer, or composition thereof, comprising contacting the nucleic acid (e.g., a DNA, RNA, e.g., a pre-mRNA) with said compound of Formula (I), (III), or (V). In an embodiment, the component of a spliceosome is selected from the U1, U2, U4, U5, U6, U11, U12, U4atac, U6atac small nuclear ribonucleoproteins (snRNPs), or a related accessory factor. In an embodiment, the component of a spliceosome is recruited to the nucleic acid in the presence of the compound of Formula (I), (III), or (V), or a pharmaceutically acceptable salt, solvate, hydrate, tautomer, stereoisomer, or composition thereof.

[0475] In another aspect, the present disclosure features a method of altering the structure or conformation of a nucleic acid (e.g., a DNA, RNA, e.g., a pre-mRNA) comprising contacting the nucleic acid with a compound of Formula (I), (III), or (V) or a pharmaceutically acceptable salt, solvate, hydrate, tautomer, stereoisomer, or composition thereof In an embodiment, the altering comprises forming a bulge or kink in the nucleic acid (e.g., a DNA, RNA, e.g., a pre-mRNA). In an embodiment, the altering comprises stabilizing a bulge or a kink in the nucleic acid (e.g., a DNA, RNA, e.g., a pre-mRNA). In an embodiment, the altering comprises reducing a bulge or a kink in the nucleic acid (e.g., a DNA, RNA, e.g., a pre-mRNA). In an embodiment, the nucleic acid (e.g., a DNA, RNA, e.g., a pre-mRNA) comprises a splice site. In an embodiment, the compound of Formula (I), (III), or (V) interacts with a nucleobase, ribose, or phosphate moiety of a nucleic acid (e.g., a DNA, RNA, e.g., pre-mRNA).

[0476] The present disclosure also provides methods for the treatment or prevention of a disease, disorder, or condition. In an embodiment, the disease, disorder or condition is related to (e.g., caused by) a splicing event, such as an unwanted, aberrant, or alternative splicing event. In an embodiment, the disease, disorder or condition comprises a proliferative disease (e.g., cancer, benign neoplasm, or inflammatory disease) or non-proliferative disease. In an embodiment, the disease, disorder, or condition comprises a neurological disease, autoimmune disorder, immunodeficiency disorder, cardiovascular condition, metabolic disorder, lysosomal storage disease, respiratory condition, renal disease, or infectious disease in a subject. In another embodiment, the disease, disorder, or condition comprises a haploinsufficiency disease, an autosomal recessive disease (e.g., with residual function), or a paralogue activation disorder. In another embodiment, the disease, disorder, or condition comprises an autosomal dominant disorder (e.g., with residual function). Such methods comprise the step of administering to the subject in need thereof an effective amount of a compound of Formula (I), (III), or (V), or a pharmaceutically acceptable salt, solvate, hydrate, tautomer, stereoisomer thereof, or a pharmaceutical composition thereof. In certain embodiments, the methods described herein include administering to a subject an effective amount of a compound of Formula (I), (III), or (V), or a pharmaceutically acceptable salt thereof, or a pharmaceutical composition thereof.

[0477] In certain embodiments, the subject being treated is a mammal. In certain embodiments, the subject is a human. In certain embodiments, the subject is a domesticated animal, such as a dog, cat, cow, pig, horse, sheep, or goat. In certain embodiments, the subject is a companion animal such as a dog or cat. In certain embodiments, the subject is a livestock animal such as a cow, pig, horse, sheep, or goat. In certain embodiments, the subject is a zoo animal. In another embodiment, the subject is a research animal such as a rodent, dog, or non-human primate. In certain embodiments, the subject is a non-human transgenic animal such as a transgenic mouse or transgenic pig.

[0478] A proliferative disease, disorder, or condition may also be associated with inhibition of apoptosis of a cell in a biological sample or subject. All types of biological samples described herein or known in the art are contemplated as being within the scope of the disclosure. The compounds of Formula (I), (III), or (V) and pharmaceutically acceptable salts, solvates, hydrates, tautomers, stereoisomers, and compositions thereof, may induce apoptosis, and therefore, be useful in treating and/or preventing proliferative diseases, disorders, or conditions.

[0479] In certain embodiments, the proliferative disease to be treated or prevented using the compounds of Formula (I), (III), or (V) is cancer. As used herein, the term “cancer” refers to a malignant neoplasm (Stedman's Medical Dictionary, 25th ed.; Hensyl ed.; Williams & Wilkins: Philadelphia, 1990). All types of cancers disclosed herein or known in the art are contemplated as being within the scope of the disclosure. Exemplary cancers include, but are not limited to, acoustic neuroma; adenocarcinoma; adrenal gland cancer; anal cancer; angiosarcoma (e.g., lymphangiosarcoma, lymphangioendotheliosarcoma, hemangiosarcoma); appendix cancer; benign monoclonal gammopathy; biliary cancer (e.g., cholangiocarcinoma); bladder cancer; breast cancer (e.g., adenocarcinoma of the breast, papillary carcinoma of the breast, mammary cancer, medullary carcinoma of the breast); brain cancer (e.g., meningioma, glioblastomas, glioma (e.g., astrocytoma, oligodendroglioma), medulloblastoma); bronchus cancer; carcinoid tumor; cervical cancer (e.g., cervical adenocarcinoma); choriocarcinoma; chordoma; craniopharyngioma; colorectal cancer (e.g., colon cancer, rectal cancer, colorectal adenocarcinoma); connective tissue cancer; epithelial carcinoma; ependymoma; endotheliosarcoma (e.g., Kaposi's sarcoma, multiple idiopathic hemorrhagic sarcoma); endometrial cancer (e.g., uterine cancer, uterine sarcoma); esophageal cancer (e.g., adenocarcinoma of the esophagus, Barrett's adenocarcinoma); Ewing's sarcoma; eye cancer (e.g., intraocular melanoma, retinoblastoma); familiar hypereosinophilia; gall bladder cancer; gastric cancer (e.g., stomach adenocarcinoma); gastrointestinal stromal tumor (GIST); germ cell cancer; head and neck cancer (e.g., head and neck squamous cell carcinoma, oral cancer (e.g., oral squamous cell carcinoma), throat cancer (e.g., laryngeal cancer, pharyngeal cancer, nasopharyngeal cancer, oropharyngeal cancer)); hematopoietic cancers (e.g., leukemia such as acute lymphocytic leukemia (ALL) (e.g., B-cell ALL, T-cell ALL), acute myelocytic leukemia (AML) (e.g., B-cell AML, T-cell AML), chronic myelocytic leukemia (CML) (e.g., B-cell CML, T-cell CML), and chronic lymphocytic leukemia (CLL) (e.g., B-cell CLL, T-cell CLL)); lymphoma such as Hodgkin lymphoma (HL) (e.g., B-cell HL, T-cell HL) and non-Hodgkin lymphoma (NHL) (e.g., B-cell NHL such as diffuse large cell lymphoma (DLCL) (e.g., diffuse large B-cell lymphoma), follicular lymphoma, chronic lymphocytic leukemia/small lymphocytic lymphoma (CLL/SLL), mantle cell lymphoma (MCL), marginal zone B-cell lymphomas (e.g., mucosa-associated lymphoid tissue (MALT) lymphomas, nodal marginal zone B-cell lymphoma, splenic marginal zone B-cell lymphoma), primary mediastinal B-cell lymphoma, Burkitt lymphoma, lymphoplasmacytic lymphoma (i.e., Waldenstrom's macroglobulinemia), hairy cell leukemia (HCL), immunoblastic large cell lymphoma, precursor B-lymphoblastic lymphoma and primary central nervous system (CNS) lymphoma; and T-cell NHL such as precursor T-lymphoblastic lymphoma/leukemia, peripheral T-cell lymphoma (PTCL) (e.g., cutaneous T-cell lymphoma (CTCL) (e.g., mycosis fungoides, Sezary syndrome), angioimmunoblastic T-cell lymphoma, extranodal natural killer T-cell lymphoma, enteropathy type T-cell lymphoma, subcutaneous panniculitis-like T-cell lymphoma, and anaplastic large cell lymphoma); a mixture of one or more leukemia/lymphoma as described above; and multiple myeloma (MM)), heavy chain disease (e.g., alpha chain disease, gamma chain disease, mu chain disease); hemangioblastoma; hypopharynx cancer; inflammatory myofibroblastic tumors; immunocytic amyloidosis; kidney cancer (e.g., nephroblastoma a.k.a. Wilms' tumor, renal cell carcinoma); liver cancer (e.g., hepatocellular cancer (HCC), malignant hepatoma); lung cancer (e.g., bronchogenic carcinoma, small cell lung cancer (SCLC), non-small cell lung cancer (NSCLC), adenocarcinoma of the lung); leiomyosarcoma (LMS); mastocytosis (e.g., systemic mastocytosis); muscle cancer; myelodysplastic syndrome (MDS); mesothelioma; myeloproliferative disorder (MPD) (e.g., polycythemia vera (PV), essential thrombocytosis (ET), agnogenic myeloid metaplasia (AMM) a.k.a. myelofibrosis (MF), chronic idiopathic myelofibrosis, chronic myelocytic leukemia (CML), chronic neutrophilic leukemia (CNL), hypereosinophilic syndrome (HES)); neuroblastoma; neurofibroma (e.g., neurofibromatosis (NF) type 1 or type 2, schwannomatosis); neuroendocrine cancer (e.g., gastroenteropancreatic neuroendocrine tumor (GEP-NET), carcinoid tumor); osteosarcoma (e.g., bone cancer); ovarian cancer (e.g., cystadenocarcinoma, ovarian embryonal carcinoma, ovarian adenocarcinoma); papillary adenocarcinoma; pancreatic cancer (e.g., pancreatic adenocarcinoma, intraductal papillary mucinous neoplasm (IPMN), Islet cell tumors); penile cancer (e.g., Paget's disease of the penis and scrotum); pinealoma; primitive neuroectodermal tumor (PNT); plasma cell neoplasia; paraneoplastic syndromes; intraepithelial neoplasms; prostate cancer (e.g., prostate adenocarcinoma); rectal cancer; rhabdomyosarcoma; salivary gland cancer; skin cancer (e.g., squamous cell carcinoma (SCC), keratoacanthoma (KA), melanoma, basal cell carcinoma (BCC)); small bowel cancer (e.g., appendix cancer); soft tissue sarcoma (e.g., malignant fibrous histiocytoma (MFH), liposarcoma, malignant peripheral nerve sheath tumor (MPNST), chondrosarcoma, fibrosarcoma, myxosarcoma); sebaceous gland carcinoma; small intestine cancer; sweat gland carcinoma; synovioma; testicular cancer (e.g., seminoma, testicular embryonal carcinoma); thyroid cancer (e.g., papillary carcinoma of the thyroid, papillary thyroid carcinoma (PTC), medullary thyroid cancer); urethral cancer; vaginal cancer; and vulvar cancer (e.g., Paget's disease of the vulva).

[0480] In some embodiments, the proliferative disease is associated with a benign neoplasm. For example, a benign neoplasm may include adenoma, fibroma, hemangioma, tuberous sclerosis, and lipoma. All types of benign neoplasms disclosed herein or known in the art are contemplated as being within the scope of the disclosure.

[0481] In some embodiments, the proliferative disease is associated with angiogenesis. All types of angiogenesis disclosed herein or known in the art are contemplated as being within the scope of the disclosure.

[0482] In some embodiments, the compound of Formula (I), (III), or (V), or a pharmaceutically acceptable salt thereof, or compositions comprising such compound or pharmaceutically acceptable salt thereof, is used to prevent or treat a non-proliferative disease. Exemplary non-proliferative diseases include a neurological disease, autoimmune disorder, immunodeficiency disorder, lysosomal storage disease, cardiovascular condition, metabolic disorder, respiratory condition, inflammatory disease, renal disease, or infectious disease.

[0483] In certain embodiments, the non-proliferative disease is a neurological disease. In certain embodiments, the compound of Formula (I), (III), or (V), or a pharmaceutically acceptable salt thereof, or compositions comprising such compound or pharmaceutically acceptable salt thereof, is used to prevent or treat a neurological disease, disorder, or condition. A neurological disease, disorder, or condition may include a neurodegenerative disease, a psychiatric condition, or a musculoskeletal disease. A neurological disease may further include a repeat expansion disease, e.g., which may be characterized by the expansion of a nucleic acid sequence in the genome. For example, a repeat expansion disease includes myotonic dystrophy, amyotrophic lateral sclerosis, Huntington's disease, a trinucleotide repeat disease, or a polyglutamine disorder (e.g., ataxia, fragile X syndrome). In some embodiments, the neurological disease comprises a repeat expansion disease, e.g., Huntington's disease. Additional neurological diseases, disorders, and conditions include Alzheimer's disease, Huntington's chorea, a prion disease (e.g., Creutzfeld-Jacob disease, bovine spongiform encephalopathy, Kuru, or scrapie), a mental retardation disorder (e.g., a disorder caused by a SETD5 gene mutation, e.g., intellectual disability-facial dysmorphism syndrome, autism spectrum disorder), Lewy Body disease, diffuse Lewy body disease (DLBD), dementia, progressive supranuclear palsy (PSP), progressive bulbar palsy (PBP), psuedobulbar palsy, spinal and bulbar muscular atrophy (SBMA), primary lateral sclerosis, Pick's disease, primary progressive aphasia, corticobasal dementia, Parkinson's disease, Down's syndrome, multiple system atrophy, spinal muscular atrophy (SMA), progressive spinobulbar muscular atrophy (e.g., Kennedy disease), post-polio syndrome (PPS), spinocerebellar ataxia, pantothenate kinase-associated neurodegeneration (PANK), spinal degenerative disease/motor neuron degenerative diseases, upper motor neuron disorder, lower motor neuron disorder, Hallervorden-Spatz syndrome, cerebral infarction, cerebral trauma, chronic traumatic encephalopathy, transient ischemic attack, Lytigo-bodig (amyotrophic lateral sclerosis-parkinsonism dementia), Guam-Parkinsonism dementia, hippocampal sclerosis, corticobasal degeneration, Alexander disease, Apler's disease, Krabbe's disease, neuroborreliosis, neurosyphilis, Sandhoff disease, Tay-Sachs disease, Schilder's disease, Batten disease, Cockayne syndrome, Kearns-Sayre syndrome, Gerstmann-Straussler-Scheinker syndrome and other transmissible spongiform encephalopathies, hereditary spastic paraparesis, Leigh's syndrome, a demyelinating diseases, neuronal ceroid lipofuscinoses, epilepsy, tremors, depression, mania, anxiety and anxiety disorders, sleep disorders (e.g., narcolepsy, fatal familial insomnia), acute brain injuries (e.g., stroke, head injury), autism, Machado-Joseph disease, or a combination thereof. In some embodiments, the neurological disease comprises Friedrich's ataxia or Sturge Weber syndrome. In some embodiments, the neurological disease comprises Huntington's disease. In some embodiments, the neurological disease comprises spinal muscular atrophy. All types of neurological diseases disclosed herein or known in the art are contemplated as being within the scope of the disclosure.

[0484] In certain embodiments, the non-proliferative disease is an autoimmune disorder or an immunodeficiency disorder. In certain embodiments, the compound of Formula (I), (III), or (V), or a pharmaceutically acceptable salt thereof, or compositions comprising such compound or pharmaceutically acceptable salt thereof, is used to prevent or treat an autoimmune disease, disorder, or condition, or an immunodeficiency disease, disorder, or condition. Exemplary autoimmune and immunodeficiency diseases, disorders, and conditions include arthritis (e.g., rheumatoid arthritis, osteoarthritis, gout), Chagas disease, chronic obstructive pulmonary disease (COPD), dermatomyositis, diabetes mellitus type 1, endometriosis, Goodpasture's syndrome, Graves' disease, Guillain-Barre syndrome (GBS), Hashiomoto's disease, Hidradenitis suppurativa, Kawasaki disease, ankylosing spondylitis, IgA nephropathy, idiopathic thrombocytopenic purpura, inflammatory bowel disease, Crohn's disease, ulcerative colitis, collagenous colitis, lymphocytic colitis, ischemic colitis, diversion colitis, Behcet's syndrome, infective colitis, indeterminate colitisinterstitial cystitis, lupus (e.g., systemic lupus erythematosus, discoid lupus, drug-induced lupus, neonatal lupus), mixed connective tissue disease, morphea, multiple sclerosis, myasthenia gravis, narcolepsy, neuromyotonia, pemphigus vulgaris, pernicious anemia, psoriasis, psoriatic arthritis, polymyositis, primary biliary cirrhosis, relapsing polychondritis, scleroderma, Sjögren's syndrome, Stiff person syndrome, vasculitis, vitiligo, a disorder caused by a GATA2 mutation (e.g., GATA2 deficiency; GATA2 haploinsufficiency; Emberger syndrome; monocytopenia and mycobacterium avium complex/dendritic cell, monocyte, B and NK lymphocyte deficiency; familial myelodysplastic syndrome; acute myeloid leukemia; chronic myelomonocytic leukemia), neutropenia, aplastic anemia, and Wegener's granulomatosis. In some embodiments, the autoimmune or immunodeficiency disorder comprises chronic mucocutaneous candidiasis. All types of autoimmune disorders and immunodeficiency disorders disclosed herein or known in the art are contemplated as being within the scope of the disclosure.

[0485] In certain embodiments, the non-proliferative disease is a cardiovascular condition. In certain embodiments, the compound of Formula (I), (III), or (V), or a pharmaceutically acceptable salt thereof, or compositions comprising such compound or pharmaceutically acceptable salt thereof, is used to prevent or treat a cardiovascular disease, disorder, or condition. A cardiovascular disease, disorder, or condition may include a condition relating to the heart or vascular system, such as the arteries, veins, or blood. Exemplary cardiovascular diseases, disorders, or conditions include angina, arrhythmias (atrial or ventricular or both), heart failure, arteriosclerosis, atheroma, atherosclerosis, cardiac hypertrophy, cardiac or vascular aneurysm, cardiac myocyte dysfunction, carotid obstructive disease, endothelial damage after PTCA (percutaneous transluminal coronary angioplasty), hypertension including essential hypertension, pulmonary hypertension and secondary hypertension (renovascular hypertension, chronic glomerulonephritis), myocardial infarction, myocardial ischemia, peripheral obstructive arteriopathy of a limb, an organ, or a tissue; peripheral artery occlusive disease (PAOD), reperfusion injury following ischemia of the brain, heart or other organ or tissue, restenosis, stroke, thrombosis, transient ischemic attack (TIA), vascular occlusion, vasculitis, and vasoconstriction. All types of cardiovascular diseases, disorders, or conditions disclosed herein or known in the art are contemplated as being within the scope of the disclosure.

[0486] In certain embodiments, the non-proliferative disease is a metabolic disorder. In certain embodiments, the compound of Formula (I), (III), or (V), or a pharmaceutically acceptable salt thereof, or compositions comprising such compound or pharmaceutically acceptable salt thereof, is used to prevent or treat a metabolic disease, disorder, or condition. A metabolic disease, disorder, or condition may include a disorder or condition that is characterized by abnormal metabolism, such as those disorders relating to the consumption of food and water, digestion, nutrient processing, and waste removal. A metabolic disease, disorder, or condition may include an acid-base imbalance, a mitochondrial disease, a wasting syndrome, a malabsorption disorder, an iron metabolism disorder, a calcium metabolism disorder, a DNA repair deficiency disorder, a glucose metabolism disorder, hyperlactatemia, a disorder of the gut microbiota. Exemplary metabolic conditions include obesity, diabetes (Type I or Type II), insulin resistance, glucose intolerance, lactose intolerance, eczema, hypertension, Hunter syndrome, Krabbe disease, sickle cell anemia, maple syrup urine disease, Pompe disease, and metachromatic leukodystrophy. All types of metabolic diseases, disorders, or conditions disclosed herein or known in the art are contemplated as being within the scope of the disclosure.

[0487] In certain embodiments, the non-proliferative disease is a respiratory condition. In certain embodiments, the compound of Formula (I), (III), or (V), or a pharmaceutically acceptable salt thereof, or compositions comprising such compound or pharmaceutically acceptable salt thereof, is used to prevent or treat a respiratory disease, disorder, or condition. A respiratory disease, disorder, or condition can include a disorder or condition relating to any part of the respiratory system, such as the lungs, alveoli, trachea, bronchi, nasal passages, or nose. Exemplary respiratory diseases, disorders, or conditions include asthma, allergies, bronchitis, allergic rhinitis, chronic obstructive pulmonary disease (COPD), lung cancer, oxygen toxicity, emphysema, chronic bronchitis, and acute respiratory distress syndrome. All types of respiratory diseases, disorders, or conditions disclosed herein or known in the art are contemplated as being within the scope of the disclosure.

[0488] In certain embodiments, the non-proliferative disease is a renal disease. In certain embodiments, the compound of Formula (I), (III), or (V), or a pharmaceutically acceptable salt thereof, or compositions comprising such compound or pharmaceutically acceptable salt thereof, is used to prevent or treat a renal disease, disorder, or condition. A renal disease, disorder, or condition can include a disease, disorder, or condition relating to any part of the waste production, storage, and removal system, including the kidneys, ureter, bladder, urethra, adrenal gland, and pelvis. Exemplary renal diseases include acute kidney failure, amyloidosis, Alport syndrome, adenovirus nephritis, acute lobar nephronia, tubular necrosis, glomerulonephritis, kidney stones, urinary tract infections, chronic kidney disease, polycystic kidney disease, and focal segmental glomerulosclerosis (FSGS). In some embodiments, the renal disease, disorder, or condition comprises HIV-associated nephropathy or hypertensive nephropathy. All types of renal diseases, disorders, or conditions disclosed herein or known in the art are contemplated as being within the scope of the disclosure.

[0489] In certain embodiments, the non-proliferative disease is an infectious disease. In certain embodiments, the compound of Formula (I), (III), or (V), or a pharmaceutically acceptable salt thereof, or compositions comprising such compound or pharmaceutically acceptable salt thereof, is used to prevent or treat an infectious disease, disorder, or condition. An infectious disease may be caused by a pathogen such as a virus or bacteria. Exemplary infectious diseases include human immunodeficiency syndrome (HIV), acquired immunodeficiency syndrome (AIDS), meningitis, African sleeping sickness, actinomycosis, pneumonia, botulism, chlamydia, Chagas disease, Colorado tick fever, cholera, typhus, giardiasis, food poisoning, ebola hemorrhagic fever, diphtheria, Dengue fever, gonorrhea, streptococcal infection (e.g., Group A or Group B), hepatitis A, hepatitis B, hepatitis C, herpes simplex, hookworm infection, influenza, Epstein-Barr infection, Kawasaki disease, kuru, leprosy, leishmaniasis, measles, mumps, norovirus, meningococcal disease, malaria, Lyme disease, listeriosis, rabies, rhinovirus, rubella, tetanus, shingles, scarlet fever, scabies, Zika fever, yellow fever, tuberculosis, toxoplasmosis, or tularemia. In some embodiments, the infectious disease comprises cytomegalovirus. All types of infectious diseases, disorders, or conditions disclosed herein or known in the art are contemplated as being within the scope of the disclosure.

[0490] In certain embodiments, the disease, disorder, or condition is a haploinsufficiency disease. In certain embodiments, the compound of Formula (I), (III), or (V), or a pharmaceutically acceptable salt thereof, or compositions comprising such compound or pharmaceutically acceptable salt thereof, is used to prevent or treat a haploinsufficiency disease, disorder, or condition. A haploinsufficiency disease, disorder, or condition may refer to a monogenic disease in which an allele of a gene has a loss-of-function lesion, e.g., a total loss of function lesion. In an embodiment, the loss-of-function lesion is present in an autosomal dominant inheritance pattern or is derived from a sporadic event. In an embodiment, the reduction of gene product function due to the altered allele drives the disease phenotype despite the remaining functional allele (i.e. said disease is haploinsufficient with regard to the gene in question). In an embodiment, a compound of Formula (I), (III), or (V) increases expression of the haploinsufficient gene locus. In an embodiment, a compound of Formula (I), (III), or (V) increases one or both alleles at the haploinsufficient gene locus. Exemplary haploinsufficiency diseases, disorders, and conditions include Robinow syndrome, cardiomyopathy, cerebellar ataxia, pheochromocytoma, Charcot-Marie-Tooth disease, neuropathy, Takenouchi-Kosaki syndrome, Coffin-Siris syndrome 2, chromosome 1p35 deletion syndrome, spinocerebellar ataxia 47, deafness, seizures, dystonia 9, GLUT1 deficiency syndrome 1, GLUT1 deficiency syndrome 2, stomatin-deficient cryohydrocytosis, basal cell carcinoma, basal cell nevus syndrome, medulloblastoma, somatic, brain malformations, macular degeneration, cone-rod dystrophy, Dejerine-Sottas disease, hypomyelinating neuropathy, Roussy-Levy syndrome, glaucoma, autoimmune lymphoproliferative syndrome, pituitary hormone deficiency, epileptic encephalopathy, early infantile, popliteal pterygium syndrome, van der Woude syndrome, Loeys-Dietz syndrome, Skraban-Deardorff syndrome, erythrocytosis, megalencephaly-polymicrogyria-polydactyly-hydrocephalus syndrome, mental retardation, CINCA syndrome, familial cold inflammatory syndrome 1, keratoendothelitis fugax hereditaria, Muckle-Wells syndrome, Feingold syndrome 1, Acute myeloid leukemia, Heyn-Sproul-Jackson syndrome, Tatton-Brown-Rahman syndrome, Shashi-Pena syndrome, Spastic paraplegia, autosomal dominant, macrophthalmia, colobomatous, with microcornea, holoprosencephaly, schizencephaly, endometrial cancer, familial, colorectal cancer, hereditary nonpolyposis, intellectual developmental disorder with dysmorphic facies and behavioral abnormalities, ovarian hyperstimulation syndrome, schizophrenia, Dias-Logan syndrome, premature ovarian failure, dystonia, dopa-responsive, due to sepiapterin reductase deficiency, Beck-Fahrner syndrome, chromosome 2p12-p11.2 deletion syndrome, neuronopathy, spastic paraplegia, familial adult myoclonic, colorectal cancer, hypothyroidism, Culler-Jones syndrome, holoprosencephaly, myelokathexis, WHIM syndrome, Mowat-Wilson syndrome, mental retardation, an intellectual developmental disorder, autism spectrum disorder, epilepsy, epileptic encephalopathy, Dravet syndrome, migraines, a mental retardation disorder (e.g., a disorder caused by a SETD5 gene mutation, e.g., intellectual disability-facial dysmorphism syndrome, autism spectrum disorder), a disorder caused by a GATA2 mutation (e.g., GATA2 deficiency; GATA2 haploinsufficiency; Emberger syndrome; monocytopenia and mycobacterium avium complex/dendritic cell, monocyte, B and NK lymphocyte deficiency; familial myelodysplastic syndrome; acute myeloid leukemia; chronic myelomonocytic leukemia), and febrile seizures.

[0491] In certain embodiments, the disease, disorder, or condition is an autosomal recessive disease, e.g., with residual function. In certain embodiments, the compound of Formula (I), (III), or (V), or a pharmaceutically acceptable salt thereof, or compositions comprising such compound or pharmaceutically acceptable salt thereof, is used to prevent or treat an autosomal recessive disease, disorder, or condition. An autosomal recessive disease with residual function may refer to a monogenic disease with either homozygous recessive or compound heterozygous heritability. These diseases may also be characterized by insufficient gene product activity (e.g., a level of gene product greater than 0%). In an embodiment, a compound of Formula (I), (III), or (V) may increase the expression of a target (e.g., a gene) related to an autosomal recessive disease with residual function. Exemplary autosomal recessive diseases with residual function include Friedreich's ataxia, Stargardt disease, Usher syndrome, chlorioderma, fragile X syndrome, achromatopsia 3, Hurler syndrome, hemophilia B, alpha-1-antitrypsin deficiency, Gaucher disease, X-linked retinoschisis, Wiskott-Aldrich syndrome, mucopolysaccharidosis (Sanfilippo B), DDC deficiency, epidermolysis bullosa dystrophica, Fabry disease, metachromatic leukodystrophy, and odontochondrodysplasia.

[0492] In certain embodiments, the disease, disorder, or condition is an autosomal dominant disease. In certain embodiments, the compound of Formula (I), (III), or (V), or a pharmaceutically acceptable salt thereof, or compositions comprising such compound or pharmaceutically acceptable salt thereof, is used to prevent or treat an autosomal dominant disease, disorder, or condition. An autosomal dominant disease may refer to a monogenic disease in which the mutated gene is a dominant gene. These diseases may also be characterized by insufficient gene product activity (e.g., a level of gene product greater than 0%). In an embodiment, a compound of Formula (I), (III), or (V) may increase the expression of a target (e.g., a gene) related to an autosomal dominant disease. Exemplary autosomal dominant diseases include Huntington's disease, achondroplasia, antithrombin III deficiency, Gilbert's disease, Ehlers-Danlos syndrome, hereditary hemorrhagic telangiectasia, intestinal polyposis, hereditary elliptosis, hereditary spherocytosis, marble bone disease, Marfan's syndrome, protein C deficiency, Treacher Collins syndrome, Von Willebrand's disease, tuberous sclerosis, osteogenesis imperfecta, polycystic kidney disease, neurofibromatosis, and idiopathic hypoparathyroidism.

[0493] In certain embodiments, the disease, disorder, or condition is a paralogue activation disorder. In certain embodiments, the compound of Formula (I), (III), or (V), or a pharmaceutically acceptable salt thereof, or compositions comprising such compound or pharmaceutically acceptable salt thereof, is used to prevent or treat a paralogue activation disease, disorder, or condition. A paralogue activation disorder may comprise a homozygous mutation of genetic locus leading to loss-of-function for the gene product. In these disorders, there may exist a separate genetic locus encoding a protein with overlapping function (e.g. developmental paralogue), which is otherwise not expressed sufficiently to compensate for the mutated gene. In an embodiment, a compound of Formula (I), (III), or (V) activates a gene connected with a paralogue activation disorder (e.g., a paralogue gene).

[0494] The cell described herein may be an abnormal cell. The cell may be in vitro or in vivo. In certain embodiments, the cell is a proliferative cell. In certain embodiments, the cell is a cancer cell. In certain embodiments, the cell is a non-proliferative cell. In certain embodiments, the cell is a blood cell. In certain embodiments, the cell is a lymphocyte. In certain embodiments, the cell is a benign neoplastic cell. In certain embodiments, the cell is an endothelial cell. In certain embodiments, the cell is an immune cell. In certain embodiments, the cell is a neuronal cell. In certain embodiments, the cell is a glial cell. In certain embodiments, the cell is a brain cell. In certain embodiments, the cell is a fibroblast. In certain embodiment, the cell is a primary cell, e.g., a cell isolated from a subject (e.g., a human subject).

[0495] In certain embodiments, the methods described herein comprise the additional step of administering one or more additional pharmaceutical agents in combination with the compound of Formula (I), (III), or (V), a pharmaceutically acceptable salt thereof, or compositions comprising such compound or pharmaceutically acceptable salt thereof. Such additional pharmaceutical agents include, but are not limited to, anti-proliferative agents, anti-cancer agents, anti-diabetic agents, anti-inflammatory agents, immunosuppressant agents, and a pain-relieving agent The additional pharmaceutical agent(s) may synergistically augment the modulation of splicing induced by the inventive compounds or compositions of this disclosure in the biological sample or subject. Thus, the combination of the inventive compounds or compositions and the additional pharmaceutical agent(s) may be useful in treating, for example, a cancer or other disease, disorder, or condition resistant to a treatment using the additional pharmaceutical agent(s) without the inventive compounds or compositions.

### EXAMPLES

[0496] In order that the invention described herein may be more fully understood, the following examples are set forth. The examples described in this application are offered to illustrate the compounds, pharmaceutical compositions, and methods provided herein and are not to be construed in any way as limiting their scope.

[0497] The compounds provided herein can be prepared from readily available starting materials using modifications to the specific synthesis protocols set forth below that would be well known to those of skill in the art. It will be appreciated that where typical or preferred process conditions (i.e., reaction temperatures, times, mole ratios of reactants, solvents, pressures, etc.) are given, other process conditions can also be used unless otherwise stated. Optimum reaction conditions may vary with the particular reactants or solvents used, but such conditions can be determined by those skilled in the art by routine optimization procedures.

[0498] Additionally, as will be apparent to those skilled in the art, conventional protecting groups may be necessary to prevent certain functional groups from undergoing undesired reactions. The choice of a suitable protecting group for a particular functional group as well as suitable conditions for protection and deprotection are well known in the art. For example, numerous protecting groups, and their introduction and removal, are described in Greene et al., Protecting Groups in Organic Synthesis, Second Edition, Wiley, New York, 1991, and references cited therein.

[0499] Reactions can be purified or analyzed according to any suitable method known in the art. For example, product formation can be monitored by spectroscopic means, such as nuclear magnetic resonance (NMR) spectroscopy (e.g., ¹H or ¹³C), infrared (IR) spectroscopy, spectrophotometry (e.g., UV-visible), mass spectrometry (MS), or by chromatographic methods such as high performance liquid chromatography (HPLC) or thin layer chromatography (TLC).

[0500] Proton NMR: ¹H NMR spectra were recorded in CDCl₃ solution in 5-mm o.d. tubes (Wildmad) at 24° C. and were collected on a BRUKER AVANCE NEO 400 at 400 MHz for ¹H. The chemical shifts (δ) are reported relative to tetramethylsilane (TMS=0.00 ppm) and expressed in ppm.

[0501] LC/MS: Liquid chromatography-mass spectrometry (LC/MS) was performed on Shimadzu-2020EV using column: Shim-pack XR-ODS (C18, Ø4.6×50 mm, 3 μm, 120 Å, 40° C.) operating in ESI(+) ionization mode; flow rate=1.2 mL/min. Mobile phase=0.05% TFA in water or CH₃CN; or on Shimadzu-2020EV using column : Poroshell HPH-C18 (C18, Ø4.6×50 mm, 3 μm, 120 Å, 40° C.) operating in ESI(+) ionization mode; flow rate=1.2 mL/min. Mobile phase A: Water/5mM NH₄HCO₃, Mobile phase B: CH₃CN.)

[0502] Analytical chiral HPLC: Analytical chiral HPLC was performed on a Agilent 1260 using column: CHIRALPAK IG-3, CHIRALPAK IC-3 or CHIRALPAK OJ-3, with flow rate=1.2 mL/min. Mobile phase=MTBE(DEA):EtOH=50:50).

[0503] Preparative HPLC purification: prep-HPLC purification was performed on a Waters-2545 or Shimadzu, using column: X-Select CSH C18 OBD (130 Å, 5 μm, 30 mm×150 mm), Xridge Prep OBD C18 (30×150 mm, 5 μm), XBridge Prep C18 OBD (Sum, 19 mm×150 mm), or YMC-Actus Triart C18 (30×150 mm, 5 μm).

[0504] Condition 1: Column: YMC-Actus Triart C18, 30×150 mm, 5 μm; Mobile Phase A: water (10 mmol/L NH₄HCO₃), Mobile Phase B: ACN; Flow rate:60 mL/min; Gradient 1:10% B up to 40% B in 8 min.

[0505] Preparative chiral HPLC: purification by chiral HPLC was performed on a Gilson-GX 281 using column: CHIALPAK IG-3, CHIRALPAK IC-3 or CHIRALPAK OJ-3.

### General Synthetic Schemes

[0506] Compounds of the present disclosure may be prepared using a synthetic protocol illustrated below in Schemes A and B.

[chemical structure]

[0507] An exemplary method of preparing a compound of Formula (I-I) is provided in Scheme A. In this scheme, A-3 is prepared in Step 1 by incubating A-1 with A-2 in the presence of hexafluorophosphate azabenzotriazole tetramethyl uranium (HATU), or a similar coupling agent, diisopropylethylamine (DIPEA), and dimethylformamide (DMF). Suitable alternatives to DIPEA and DMF may also be used in the reaction. In Step 2, A-3 is cyclized by treatment with tosic acid, or a similar alternative, in order to provide A4.

[0508] Next, in Step 3, A-4 is coupled with A-5 to provide a compound of Formula (I-I). This coupling reaction may be conducted in the presence of Pd₂(dba)₃, XPhos, and KOtBu or a similar reagent. Alternative catalysts to Pd₂(dba)₃ may also be used, such as any suitable palladium catalyst. Likewise, other ligands similar to XPhos may be implemented in the reaction of Step 3. The reaction of Step 3 is carried out in dioxane, or a similar solvent, and the reaction is heated to 80° C. or a temperature sufficient to provide the compound of Formula (I-I). Each starting material and/or intermediate in Scheme A may be protected and deprotected using standard protecting group methods. In addition, purification and characterization of each intermediate as well as the final compound of Formula (I) may be afforded by any accepted procedure.

[chemical structure]

[chemical structure]

[chemical structure]

[chemical structure]

[chemical structure]

### Example 1

### Synthesis of Compound 108

### Synthesis of Intermediate B2

[chemical structure]

[0510] A mixture of 2-methyl-2H-indazole-5-carboxylic acid (B1; 230 mg, 1.3 mmol) in thionyl chloride (4 mL) was stirred at room temperature for 16 h. Additional thionyl chloride (2 mL) was then added dropwise, followed by one drop of DMF, and the reaction mixture was stirred at 80° C. for 4 h. The resulting solution was cooled and concentrated, and toluene (3 mL) was added. The resulting suspension was concentrated to dryness, and then co-evaporated with toluene two more times, to afford 2-methyl-2H-indazole-5-carboxylic acid (B2; 254 mg, 1.3 mmol), which was used in the next step without further purification.

### Synthesis of Intermediate B4

[chemical structure]

[0512] 2-Amino-5-bromobenzoic acid (B3; 279 mg, 1.3 mmol) was added to methyl-2H-indazole-6-carbonyl chloride (B2; 254 mg, 1.3 mmol) in dichloroethane (13 mL) at 0° C., followed by diisopropylethylamine (250 μL, 1.43 mmol). The reaction was then warmed to room temperature and stirred for 16 h, and then concentrated, to afford 5-bromo-2-(2-methyl-2H-indazole-5-carboxamido)benzoic acid (B4) which used in the next step without further purification. LCMS (ES, m/z): 374.0 [M+H]⁺.

### Synthesis of Intermediate B5

[chemical structure]

[0514] 5-Bromo-2-(2-methyl-2H-indazole-5-carboxamido)benzoic acid (B4) was added to a mixture of acetic acid (1.5 mL) and acetic anhydride (1.5 mL) and stirred at 100° C. for 3 h, then poured into ice. The resulting precipitate was collected by filtration, rinsed with water, and dried to afford 6-bromo-2-(2-methyl-2H-indazol-5-yl)-4H-benzo[d][1,3]oxazin-4-one (B5; 380 mg) as a solid. LCMS (ES, m/z): 355.8 [M+H]⁺. ¹H NMR (DMSO-d₆, 400 MHz): δ_{H} 8.67 (1H, s), 8.62 (1H, s), 8.22 (1H, s), 8.08 (1H, d, J=8.7 Hz), 8.04 (1H, d, J=9.3 Hz), 7.73 (1H, d, J=9.2 Hz), 7.64 (1H, d, J=8.6 Hz), 4.21 (3H, s).

### Synthesis of Intermediate B6

[chemical structure]

[0516] A suspension of 6-bromo-2-(2-methyl-2H-indazol-5-yl)-4H-benzo[d][1,3]oxazin-4-one (B5; 200 mg, 0.56 mmol) in 2-methyltetrahydrofuran (10 mL) was cooled in an ice bath, and ammonia was bubbled through the mixture for 5 minutes. The reaction mixture was then concentrated to dryness, to afford N-(4-bromo-2-carbamoylphenyl)-2-methyl-2H-indazole-5-carboxamide (B6) which was used in the next step without further purification. LCMS (ES, m/z): 373.0 [M+H]⁺.

### Synthesis of Intermediate B7

[chemical structure]

[0518] A 2N solution of sodium hydroxide (2.3 mL, 4.6 mmol) was added to a suspension of N-(4-bromo-2-carbamoylphenyl)-2-methyl-2H-indazole-5-carboxamide (B6; 190 mg, 0.51 mmol) in ethanol (11.2 mL) and stirred for 16 h. The mixture was then concentrated under vacuum and acidified with 6N HCl to achieve a pH of 6. The resulting solid was collected by filtration and dried, to afford 6-bromo-2-(2-methyl-2H-indazol-5-yl)quinazolin-4(3H)-one (B7; 165 mg) as a solid. LCMS (ES, m/z): 354.9 [M+H]⁺. ¹H NMR (DMSO-d₆, 400 MHz): δ_{H} 12.66 (1H, s), 8.64 (1H, s), 8.59 (1H, s), 8.21 (1H, s), 8.06 (1H, d, J=9.2 Hz), 7.96 (1H, d, J=8.5 Hz), 7.69 (2H, t, J=8.6 Hz), 4.20 (3H, s).

### Synthesis of Compound 108

[chemical structure]

[0520] A mixture of 6-bromo-2-(2-methyl-2H-indazol-5-yl)quinazolin-4(3H)-one (B7; 75 mg, 0.21 mmol), Pd₂(dba)₃ (19.3 mg, 0.021 mmol), and X-Phos (20.1 mg, 0.042 mmol) was evacuated and purged with argon three times. Anhydrous tetrahydrofuran (10.5 mL) was then added, and argon was bubbled through the suspension for 5 minutes. N-Methyl piperazine (B8) was then added and the reaction was stirred for 10 min, after which LiHMDS (1M in tetrahydrofuran; 1 mL) was added dropwise and the reaction was stirred for 16 h, and then cooled to 0° C. and quenched with water. The pH was adjusted to 7 with a 1N solution of HCl, and the mixture was concentrated. The aqueous phase was extracted three times with dichloromethane, and then concentrated to dryness. The resulting solid was stirred in dichloromethane/methanol (9/1; 20 mL), filtered, and further rinsed with dichloromethane/methanol (9/1). The filtrate was concentrated and purified by silica gel column chromatography eluting with methanol in dichloromethane (15 to 30%). The recovered material was stirred in ethyl acetate (5 mL), filtered, and rinsed with cold ethyl acetate, to afford 2-(2-methyl-2H-indazol-5-yl)-6-(4-methylpiperazin-1-yl)quinazolin-4(3H)-one (Compound 108; 22 mg) as a solid. LCMS (ES, m/z): 375.2 [M+H]⁺. ¹H NMR (CH₃OH-d4, 400 MHz): δ_{H} 8.41 (2H, s), 8.00 (1H, d, J=9.2 Hz), 7.71-7-75 (2H, m), 7.61-7.63 (2H, m), 4.26 (3H, s), 3.43 (4H, s), 2.88 (4H, s), 2.54 (3H, s). Note: Signal of the amide-NH hydrogen atom exchanges with the residual water from the CH₃OH-d₄.

### Example 2

### Synthesis of Compound 152

### Synthesis of Intermediate B16

[chemical structure]

[0522] Diisopropylethylamine (1.6 mL, 9 mmol) and HATU (1.37 g, 3.6 mmol) were added sequentially to a solution of 2-amino-4-bromobenzoic acid (B15; 650 mg, 3 mmol) and 2-methyl-2H-indazol-5-amine (B10; 465 mg, 3.2 mmol) in dimethylformamide (14 mL), and the mixture was stirred at 0° C. for 1 h, then warmed to room temperature and stirred overnight. Ethyl acetate (100 mL) and a saturated solution of ammonium chloride (100 mL) were added to the mixture, and the organic layer was separated and washed with a saturated solution of ammonium chloride (50 mL), saturated sodium bicarbonate (50 mL), and brine (50 mL), then dried over magnesium sulfate, filtered, and concentrated under reduced pressure, to afford 2-amino-4-bromo-N-(2-methyl-2H-indazol-5-yl)benzamide (B16; 1.1 g) as a solid. LCMS (ES, m/z): 345.0 [M+H]⁺.

### Synthesis of Intermediate B17

[chemical structure]

[0524] Triethyl orthoformate (4.38 g, 29.6 mmol) and tosic acid (60 mg, 0.3 mmol) were added to a solution of 2-amino-4-bromo-N-(2-methyl-2H-indazol-5-yl)benzamide (B16; 1 g, 3 mmol) in tetrahydrofuran (5 mL), and the resulting mixture was stirred at room temperature for 1 h. Ethyl acetate (50 mL) was then added, and the mixture was washed with saturated sodium bicarbonate (2×50 mL) and brine (50 mL), then dried over magnesium sulfate, filtered and concentrated under reduced pressure, to afford 7-bromo-3-(2-methyl-2H-indazol-5-yl)quinazolin-4(3H)-one (B17; 0.87 g) as a solid. LCMS (ES, m/z): 355.0 [M+H]⁺.

### Synthesis of Compound 152

[chemical structure]

[0526] A mixture of 7-bromo-3-(2-methyl-2H-indazol-5-yl)quinazolin-4(3H)-one (B17; 100 mg, 0.28 mmol), 1-methylpiperazine (B8; 84 mg, 0.85 mmol), Xantphos-Pd-Allyl complex (21 mg, 0.03 mmol) and potassium tert-butoxide (47 mg, 0.42 mmol) in dioxane (5 mL) was heated to 100° C. for 24 h, and then cooled to room temperature and diluted with dichloromethane. The resulting mixture was filtered through Celite, and the filtrate was concentrated under reduced pressure and purified by reverse phase chromatography eluting with acetonitrile in a 0.1% aqueous HCl solution (using a gradient of 5 to 50% acetonitrile), to afford 3-(2-methyl-2H-indazol-5-yl)-7-(4-methylpiperazin-1-yl)quinazolin-4(3H)-one (Compound 152; 25 mg) as an HCl salt. LCMS (ES, m/z): 375.2 [M+H]⁺. ¹H NMR (CH₃OH-d₄, 400 MHz): δ_{H} 9.35 (1H, s), 8.41 (1H, s), 8.23 (1H, d, J=9.1 Hz), 7.95 (1H, s), 7.79 (1H, d, J=9.1 Hz), 7.74 (1H, s), 7.42 (2H, t, J=7.4 Hz), 7.15 (1H, s), 5.05 (5H, m), 3.68 (2H, d, J=12.3 Hz), 3.46 (2H, t, J=13.2 Hz), 3.29 (2H, m), 2.98 (3H, s).

### Example 3

### Synthesis of Compound 153

### Synthesis of Intermediate B19

[chemical structure]

[0528] A mixture of 7-bromo-3-(2-methyl-2H-indazol-5-yl)quinazolin-4(3H)-one (B17 from Example 3; 100 mg, 0.28 mmol), tert-butyl piperazine-1-carboxylate (B18; 157 mg, 0.85 mmol), Xantphos-Pd-Allyl complex (21 mg, 0.03 mmol) and potassium tert-butoxide (47 mg, 0.42 mmol) in dioxane (5 mL) was heated to 100° C. for 24 h and then cooled to room temperature and diluted with dichloromethane. The mixture was filtered through Celite and concentrated under reduced pressure, to afford crude tert-butyl 4-(3-(2-methyl-2H-indazol-5-yl)-4-oxo-3,4-dihydroquinazolin-7-yl)piperazine-1-carboxylate (B19; 110 mg) which was used in the next step without further purification. LCMS (ES, m/z): 461.3 [M+H]⁺.

### Synthesis of Compound 153

[chemical structure]

[0530] A mixture of tert-butyl 4-(3-(2-methyl-2H-indazol-5-yl)-4-oxo-3,4-dihydroquinazolin-7-yl)piperazine-1-carboxylate (B19; 110 mg, 0.31 mmol) and 4M HCl in dioxane (3 mL, 12 mmol) was stirred at room temperature for 2 h. The volatiles were then removed under reduced pressure and the crude product was purified by reverse phase chromatography eluting with acetonitrile in a 0.1% aqueous HCl solution (using a gradient of 5 to 50% acetonitrile), to afford 3-(2-methyl-2H-indazol-5-yl)-7-(piperazin-1-yl)quinazolin-4(3H)-one (Compound 153; 34 mg) as an HCl salt. LCMS (ES, m/z): 361.3 [M+H]⁺. ¹H NMR (DMSO-d₆, 400 MHz): δ_{H} 8.94-8.99 (2H, m), 8.47 (1H, s), 8.32 (1H, s), 8.03 (1H, d, J=8.9 Hz), 7.83 (1H, s), 7.69 (1H, d, J=9.1 Hz), 7.28 (2H, t, J=8.9 Hz), 7.11 (1H, s), 4.20 (3H, s), 3.63 (4H, s), 3.24 (4H, s).

### Example 4

### Synthesis of Compound 156

### Synthesis of Intermediate B21

[chemical structure]

[0532] A mixture of 2-amino-4-bromobenzoic acid (B15; 200 mg, 0.93 mmol) and 4-amino-1-methylpiperidine (B20; 120 mg, 1.05 mmol) in dimethylacetamide (4.6 mL) was cooled to 0° C. Diisopropylethylamine (500 μL, 2.86 mmol) was then added dropwise, followed by HATU (388 mg, 1 mmol), and the resulting mixture was stirred at room temperature for 3 h. Ethyl acetate (25 mL) was then added, and the mixture was washed with saturated aqueous ammonium chloride (25 mL), followed by saturated aqueous sodium bicarbonate (25 mL), and brine (25 mL). The organic layer was dried over anhydrous sodium sulfate and concentrated in vacuo to afford 2-amino-4-bromo-N-(1-methylpiperidin-4-yl)benzamide (B21; 199 mg, 0.64 mmol) as a solid. LCMS (ES, m/z): 312.1 [M+H]⁺.

### Synthesis of Intermediate B22

[chemical structure]

[0534] Phosphoryl chloride (0.85 mL, 6.29 mmol) was added to dimethylformamide (0.48 mL) under a nitrogen atmosphere, and the resulting mixture was stirred at room temperature for 40 min. 2-Amino-4-bromo-N-(1-methylpiperidin-4-yl)benzamide (B21; 65 mg, 0.21 mmol) was then added, and the reaction mixture was stirred at room temperature for 30 min, and then heated to 80° C. overnight. The mixture was then diluted with ethyl acetate (15 mL) and saturated aqueous sodium bicarbonate (15 mL). The aqueous layer was washed with ethyl acetate (3×15 mL), and the combined organic layers were dried over anhydrous sodium sulfate and concentrated in vacuo, to afford 7-bromo-3-(1-methylpiperidin-4-yl)quinazolin-4(3H)-one (B22; 55 mg, 0.17 mmol) as an oil. LCMS (ES, m/z): 322.1 [M+H]⁺.

### Synthesis of Compound 156

[chemical structure]

[0536] A mixture of 7-bromo-3-(1-methylpiperidin-4-yl)quinazolin-4(3H)-one (B22; 55 mg, 0.15 mmol), 2,7-dimethyl-5-(4,4,5,5-tetramethyl-1,3,2-dioxaborolan-2-yl)-2H-indazole (B23; 51 mg, 0.16 mmol), PdCl₂(dppf) (14 mg, 0.015 mmol) and Cs₂CO₃ (111 mg, 0.29 mmol) in dioxane (2.5 mL) and H₂O (0.2 mL) was heated to 90° C. for 16 h and then cooled to room temperature. The reaction mixture was dissolved in dimethylformamide and filtered through Celite using dimethylformamide as an eluent. The filtrate was concentrated under vacuum, diluted with 1M aqueous HCl (20 mL), and washed with dichloromethane (3×15 mL). The aqueous layer was filtered under vacuum and neutralized with sodium carbonate, and the resulting suspension was extracted with dichloromethane (3×15 mL). The organic layer was dried over sodium sulfate and concentrated in vacuo to afford 7-(2,7-dimethyl-2H-indazol-5-yl)-3-(1-methylpiperidin yl)quinazolin-4(3H)-one (Compound 156; 53 mg, 0.14 mmol) as a solid. LCMS (ES, m/z): 388.2 [M+H]⁺. ¹H NMR (CH₃OH-d₄, 400 MHz): δ 8.40 (1H, s), 8.28 (2H, s), 7.91 (3H, s), 7.47 (1H, s), 4.75 (1H, m) 4.25 (3H, s), 3.07 (2H, d, J=11.7 Hz), 2.64 (3H, s), 2.37 (3H, s), 2.27 (2H, t, J=12.3 Hz), 2.16 (2H, d, J=15.0 Hz), 1.97 (2H, d, J=11.8 Hz).

### Example 5

### Synthesis of Compound 157

### Synthesis of Intermediate B24

[chemical structure]

[0538] A mixture of 2-amino-4-bromobenzoic acid (B15; 100 mg, 0.46 mmol) and 2,2,6,6-tetramethylpiperidin-4-amine (B23; 80 mg, 0.51 mmol) in dimethylacetamide (2.3 mL) was cooled to 0° C., then diisopropylethylamine (250 μL, 1.43 mmol) was added dropwise followed by HATU (194 mg, 0.51 mmol). The mixture was then stirred at room temperature 3 h, and then diluted with ethyl acetate (20 mL) and washed with saturated aqueous ammonium chloride (20 mL), followed by saturated aqueous sodium bicarbonate (20 mL), and brine (20 mL). The organic layer was dried over anhydrous sodium sulfate, and concentrated in vacuo, to afford 2-amino-4-bromo-N-(2,2,6,6-tetramethylpiperidin-4-yl)benzamide (B24; 153 mg, 0.43 mmol) as a solid. LCMS (ES, m/z): 354.1 [M+H]⁺.

### Synthesis of Intermediate B25

[chemical structure]

[0540] Phosphoryl chloride (0.86 mL, 6.37 mmol) was added to dimethylformamide (0.53 mL) under a nitrogen atmosphere, and the resulting solution was stirred at room temperature for 40 minutes. 2-Amino-4-bromo-N-(2,2,6,6-tetramethylpiperidin-4-yl)benzamide (B24; 69 mg, 0.2 mmol) was then added, and the resulting mixture was stirred at room temperature for 40 minutes, and then heated to 80° C. overnight. The reaction mixture was diluted with ethyl acetate (15 mL) and saturated aqueous sodium bicarbonate (15 mL). The aqueous layer was washed with ethyl acetate (3×15 mL), and the combined organic layers were dried over anhydrous sodium sulfate and concentrated in vacuo, to afford 7-bromo-3-(2,2,6,6-tetramethylpiperidin-4-yl)quinazolin-4(3H)-one (B25; 60 mg, 0.165 mmol) as a solid. LCMS (ES, m/z): 364.1 [M+H]⁺.

### Synthesis of Compound 157

[chemical structure]

[0542] A mixture of 7-bromo-3-(2,2,6,6-tetramethylpiperidin-4-yl)quinazolin-4(3H)-one (B25; 60 mg, 0.17 mmol), 2,7-dimethyl-5-(4,4,5,5-tetramethyl-1,3,2-dioxaborolan-2-yl)-2H-indazole (B23; 50 mg, 0.18 mmol), PdCl₂(dppf) (14 mg, 0.017 mmol) and cesium carbonate (110 mg, 0.34 mmol) in dioxane (2.2 mL) and H₂O (0.2 mL) was heated to 90° C. for 16 h and then cooled to room temperature. The resulting mixture was filtered through Celite using ethyl acetate as an eluent, and the filtrate was concentrated under reduced pressure. The residue was purified by reverse phase chromatography using a C18 column eluting with acetonitrile in a 0.1% aqueous HCl solution (using a gradient of 5 to 70% acetonitrile). The fractions containing product were combined and lyophilized, to afford 7-(2,7-dimethyl-2H-indazol-5-yl)-3-(2,2,6,6-tetramethylpiperidin-4-yl)quinazolin-4(3H)-one hydrochloride (Compound 157; 19 mg, 0.041 mmol) as a solid. LCMS (ES, m/z): 430.3 [M+H]⁺. ¹H NMR (CH₃OH-d₄, 400 MHz): δ 9.26 (1H, s), 8.56 (1H, s), 8.41 (1H, d, J=8.4 Hz), 8.04-8.06 (2H, m), 7.99 (1H, s), 7.78 (1H, s), 7.65 (1H, s), 5.31 (1H, s), 4.34 (3H, s), 2.69 (3H, s), 2.65 (1H, s), 2.46 (2H, t, J=13.0 Hz), 2.21 (2H, d, J=13.3 Hz), 1.65 (6H, s), 1.59 (6H, s).

### Example 6

### Synthesis of Compound 158

### Synthesis of Intermediate B26

[chemical structure]

[0544] A mixture of 7-bromo-3-(2-methyl-2H-indazol-5-yl)quinazolin-4(3H)-one (B17 from Example 3; 300 mg, 0.85 mmol), tert-butyl 4-(4,4,5,5-tetramethyl-1,3,2-dioxaborolan-2-yl)-3,6-dihydropyridine-1(2H)-carboxylate (B13; 261 mg, 0.85 mmol), Pd(dppf)Cl₂ (20 mg, 0.09 mmol) and potassium carbonate (350 mg, 2.54 mmol) in dioxane (10 mL) and H₂O (2 mL) was heated to 80° C. for 2 h and then cooled to room temperature. The mixture was diluted with ethyl acetate (100 mL) and washed with saturated aqueous sodium bicarbonate (50 mL) and brine (50 mL). The organic layer was separated, dried over magnesium sulfate, filtered and concentrated under reduced pressure. The crude product was purified by silica gel column chromatography eluting with methanol in dichloromethane (0 to 10%), to afford tert-butyl 4-(3-(2-methyl-2H-indazol-5-yl)-4-oxo-3,4-dihydroquinazolin-7-yl) -3,6-dihydropyridine-1(2H)-carboxylate (B26; 260 mg) as a solid. LCMS (ES, m/z): 458.2 [M+H]⁺.

### Synthesis of Compound 158

[chemical structure]

[0546] Trifluoroacetic acid (3 mL, 39 mmol) was added to a solution of tert-butyl 4-(3-(2-methyl-2H-indazol-5-yl)-4-oxo-3,4-dihydroquinazolin-7-yl)-3,6-dihydropyridine-1(2H)-carboxylate (B26; 92 mg, 0.2 mmol) in dichloromethane (3 mL), and the reaction mixture was stirred at room temperature for 0.5 h. The volatiles were removed under reduced pressure and the crude product was purified by reverse phase chromatography eluting with acetonitrile in a 0.1% aqueous HCl solution (using a gradient of 5 to 50% acetonitrile), to afford 3-(2-methyl-2H-indazol-5-yl)-7-(1,2,3,6-tetrahydropyridin-4-yl)quinazolin-4(3H)-one (Compound 158; 33 mg) as an HCl salt. LCMS (ES, m/z): 358.2 [M+H]⁺. ¹H NMR (DMSO-d₆, 400 MHz): δ_{H} 9.02 (2H, s), 8.49 (1H, s), 8.41 (1H, s), 8.19 (1H, d, J=8.3 Hz), 7.88 (1H, s), 7.69-7.76 (3H, m), 7.31 (1H, d, J=9.2 Hz), 6.52 (1H, s), 4.21 (3H, s), 3.36 (2H, s), 2.80 (2H, s). Note: Signal of two hydrogen atoms are overlapping with residual water peak from the deuterated solvent.

### Example 7

### Synthesis of Compound 159

[chemical structure]

[0548] A mixture of 3-(2-methyl-2H-indazol-5-yl)-7-(1,2,3,6-tetrahydropyridin-4-yl)quinazolin-4(3H)-one (Compound 158 from Example 9; 100 mg, 0.25 mmol) and formaldehyde (37% in water, 103 mg, 0.085 mL, 1.27 mmol) was stirred at room temperature for 1 h. Sodium triacetoxyborohydride was then added to the mixture and stirred at room temperature for an additional 1 h. The mixture was then diluted with ethyl acetate (50 mL) and washed with saturated aqueous sodium bicarbonate (2×50 mL) and brine (50 mL). The organic layer was separated, dried over magnesium sulfate, filtered and concentrated under reduced pressure. The crude product was purified by silica gel column chromatography eluting with methanol in dichloromethane (1 to 10%) to afford 7-(1-methyl-1,2,3,6-tetrahydropyridin-4-yl)-3-(2-methyl-2H-indazol-5-yl)quinazolin-4(3H)-one (Compound 159; 23 mg) as a solid. LCMS (ES, m/z): 372.2 [M+H]⁺. ¹H NMR (CH₃OH-d₄:CDCl₃ (9:1), 400 MHz): δ_{H} 8.29 (2H, d, J=3.1 Hz), 8.24 (1H, d, J=8.4 Hz), 7.69-7.79 (4H, m), 7.33 (1H, d, J=9.1 Hz), 6.42 (1H, s), 4.26 (3H, s), 3.23 (2H, s), 2.78 (2H, d, J=5.9 Hz), 2.72 (2H, s), 2.43 (3H, s).

### Example 8

### Synthesis of Compound 160

### Synthesis of Intermediate B28

[chemical structure]

[0550] A mixture of 7-bromo-3-(2-methyl-2H-indazol-5-yl)quinazolin-4(3H)-one (B17 from Example 3; 200 mg, 0.56 mmol), tert-butyl 3-(4,4,5,5-tetramethyl-1,3,2-dioxaborolan-2-yl)-8-azabicyclo[3.2.1]oct-2-ene-8-carboxylate (B27; 189 mg, 0.56 mmol), Pd(dppf)Cl₂ (40 mg, 0.06 mmol) and potassium carbonate (234 mg, 1.69 mmol) in dioxane (50 mL) and H₂O (1 mL) was stirred at 80° C. for 18 h, and then cooled to room temperature. The mixture was diluted with ethyl acetate (50 mL) and washed with saturated sodium bicarbonate (25 mL) and brine (25 mL). The organic layer was then separated, dried over magnesium sulfate, filtered, and concentrated under reduced pressure, to afford tert-butyl 3-(3-(2-methyl-2H-indazol-5-yl)-4-oxo-3,4-dihydroquinazolin-7-yl)-8-azabicyclo[3.2.1]oct-2-ene-8-carboxylate (B28; 260 mg) as a solid. LCMS (ES, m/z): 484.2 [M+H]⁺.

### Synthesis of Compound 160

[chemical structure]

[0552] A 4M solution of HCl in dioxane (4 mL) was added to a solution of tert-butyl 3-(3-(2-methyl-2H-indazol-5-yl)-4-oxo-3,4-dihydroquinazolin-7-yl)-8-azabicyclo[3.2.1]oct-2-ene-8-carboxylate (B28; 92 mg, 0.2 mmol) in methanol (2 mL), and the resulting mixture was stirred at room temperature for 1 h. The volatiles were then removed under reduced pressure, and the residue was purified by reverse phase chromatography eluting with acetonitrile in a 0.1% aqueous formic acid solution (using a gradient of 5 to 50% acetonitrile) to provide a solid, which was then dissolved in water (3 mL), neutralized with ammonium carbonate (20 mg, 0.19 mmol) and lyophilized, to afford 7-(8-azabicyclo[3.2.1]oct-2-en-3-yl)-3-(2-methyl-2H-indazol-5-yl)quinazolin-4(3H)-one (Compound 160; 11 mg). LCMS (ES, m/z): 384.1 [M+H]⁺. ¹H NMR (DMSO-d₆, 400 MHz): δ_{H} 8.48 (1H, s), 8.39 (1H, s), 8.13 (1H, d, J=8.3 Hz), 7.87 (1H, d, J=1.9 Hz), 7.68-7.71 (3H, m), 7.30 (1H, dd, J=9.1, 2.0 Hz), 6.79 (1H, d, J=5.6 Hz), 4.21 (3H, s), 4.01-4.08 (2H, m), 2.97 (1H, dd, J=17.3, 4.4 Hz), 2.01-2.08 (2H, m), 1.89-1.96 (1H, m), 1.71-1.77 (1H, m). Note: Signal of two hydrogen atoms are overlapping with solvent peak of residual DMSO-d₅.

### Example 9

### Synthesis of Compound 161

[chemical structure]

[0554] A mixture of 7-(8-azabicyclo[3.2.1]oct-2-en-3-yl)-3-(2-methyl-2H-indazol-5-yl)quinazolin-4(3H)-one (Compound 160 from Example 11; 50 mg, 0.12 mmol) and formaldehyde (37% in water, 0.05 mL, 0.60 mmol) in dichloromethane (6 mL) and ethanol (2 mL), was stirred at room temperature for 1 h. Sodium triacetoxyborohydride (151 mg, 0.71 mmol) was then added to the mixture and stirred for an additional 1 h. The mixture was diluted with ethyl acetate (50 mL), and washed with saturated aqueous sodium bicarbonate (2×50 mL) and brine (50 mL). The organic layer was separated, dried over magnesium sulfate, filtered, and concentrated under reduced pressure. The crude product was purified by reverse phase chromatography eluting with acetonitrile in a 0.1% aqueous HCl solution (using a gradient of 5 to 50% acetonitrile) to provide a solid that was dissolved in water (3 mL), neutralized with ammonium carbonate (20 mg, 0.19 mmol) and lyophilized. The resulting solid was then washed with water (2×1 mL), filtered, and dried, to afford 3-(2-methyl-2H-indazol-5-yl)-7-(8-methyl-8-azabicyclo[3.2.1]oct-2-en-3-yl)quinazolin-4(3H)-one (Compound 161; 14 mg) as a solid. LCMS (ES, m/z): 398.2 [M+H]⁺. ¹H NMR (DMSO-d₆, 400 MHz): δ_{H} 8.49 (1H, s), 8.42 (1H, s), 8.18 (1H, d, J=8.3 Hz), 7.88 (1H, s), 7.69-7.79 (3H, m), 7.30 (1H, dd, J=9.1, 1.9 Hz), 6.81 (1H, d, J=5.7 Hz), 4.27-4.30 (1H, m), 4.21 (3H, s), 4.07-4.17 (1H, m), 3.09-3.24 (1H, m), 2.72-2.86 (5H, m), 2.18-2.39 (2H, m), 1.93-2.00 (1H, m).

### Example 10

### Synthesis of Compound 162

### Synthesis of Intermediate B30

[chemical structure]

[0556] A mixture of 7-bromo-3-(2-methyl-2H-indazol-5-yl)quinazolin-4(3H)-one (B17 from Example 3; 50 mg, 0.14 mmol), tert-butyl 4-aminopiperazine-1-carboxylate (B29; 56 mg, 0.28 mmol), Xantphos-Pd-Allyl complex (11 mg, 0.014 mmol) and potassium tert-butoxide (24 mg, 0.21 mmol) in dioxane (5 mL) was heated to 100° C. for 24 h and then cooled to room temperature and diluted with dichloromethane. The resulting mixture was filtered through Celite and concentrated under reduced pressure to afford crude tert-butyl 4-((3-(2-methyl-2H-indazol-5-yl)-4-oxo-3,4-dihydroquinazolin-7-yl)amino)piperidine-1-carboxylate (B30; 64 mg) which was used in the next step without further purification. LCMS (ES, m/z): 475.3 [M+H]⁺.

### Synthesis of Compound 162

[chemical structure]

[0558] A mixture of tert-butyl 4-((3-(2-methyl -2H-indazol-5-yl)-4-oxo-3,4-dihydroquinazolin-7-yl)amino)piperidine-1-carboxylate (B30; 64 mg, 0.14 mmol) and 4M HCl in dioxane (3 mL) was stirred at room temperature for 2 h. The volatiles were then removed under reduced pressure and the crude product was purified by reverse phase chromatography eluting with acetonitrile in a 0.1% aqueous HCl solution (using a gradient of 5 to 50% acetonitrile), to afford 3-(2-methyl-2H-indazol-5-yl)-7-(piperazin-1-ylamino)quinazolin-4(3H)-one (Compound 162; 22 mg) as an HCl salt. LCMS (ES, m/z): 375.2 [M+H]⁺. ¹H NMR (CH₃OH-d₄, 400 MHz): δ_{H} 8.77 (1H, s), 8.36 (1H, s), 8.05 (1H, d, J=9.0 Hz), 7.86 (2H, s), 7.76 (1H, d, J=9.2 Hz), 7.33-7.36 (1H, m), 6.98-7.01 (1H, m), 6.78 (1H, s), 4.27 (3H, s), 3.82-3.87 (1H, m), 3.46-3.51 (2H, m), 3.17-3.24 (2H, m), 2.28-2.34 (2H, m), 1.75-1.82 (2H, m). Note: Signals for hydrogen atoms of HCl salt exchanged with the residual water from the CH₃OH-d₄.

### Example 11

### Synthesis of Compound 163

[chemical structure]

[0560] A mixture of 7-bromo-3-(2-methyl-2H-indazol-5-yl)quinazolin-4(3H)-one (B17 from Example 3; 300 mg, 0.85 mmol), 1-methylpiperidin-4-amine (B31′; 145 mg, 1.27 mmol), Xantphos-Pd-Allyl complex (32 mg, 0.042 mmol) and potassium tert-butoxide (142 mg, 1.27 mmol) in dioxane (15 mL) was stirred at 100° C. for 18 h and then cooled to room temperature and diluted with dichloromethane. The mixture was filtered through Celite and concentrated under reduced pressure, and purified by reverse phase chromatography eluting with acetonitrile in a 0.1% aqueous formic acid solution (using a gradient of 5 to 50% acetonitrile) to provide a solid that was dissolved in water (3 mL), neutralized with ammonium carbonate (20 mg, 0.19 mmol) and lyophilized, to afford 3-(2-methyl-2H-indazol-5-yl)-7-((1-methylpiperidin-4-yl)amino)quinazolin-4(3H)-one (Compound 163; 27 mg). LCMS (ES, m/z): 389.2 [M+H]⁺. ¹H NMR (DMSO-d₆, 400 MHz): δ_{H} 8.45 (1H, s), 8.17 (1H, s), 7.83 (1H, d, J=8.9 Hz), 7.79 (1H, s), 7.66 (1H, d, J=9.3 Hz), 7.24 (1H, d, J=9.2 Hz), 6.83 (1H, d, J=8.9 Hz), 6.63-6.65 (2H, m), 4.20 (3H, s), 2.76 (2H, d, J=10.6 Hz), 2.19 (3H, s), 2.08 (2H, t, J=11.2 Hz), 1.92 (2H, d, J=12.3 Hz), 1.40-1.49 (2H, m). Note: Signal of one hydrogen atom is overlapping with the residual water from DMSO-d₆.

### Example 12

### Synthesis of Compound 165

### Synthesis of Intermediate B33

[chemical structure]

[0562] A mixture of 6-bromo-2-(methylthio)quinazolin-4(3H)-one (B32; 114 mg, 0.42 mmol) and N-methylpiperazine (B8; 2 mL) was stirred at 130° C. for 24 h, then cooled. The mixture was then suspended in diethyl ether and stirred for 1 h. The solid was collected by filtration and rinsed with diethyl ether, and then dissolved in dichloromethane/methanol and purified by silica gel column chromatography eluting with methanol in dichloromethane (1 to 20%), to afford 6-bromo-2-(4-methylpiperazin-1-yl)quinazolin-4(3H)-one (B33; 38 mg) as a solid. LCMS (ES, m/z): 323.1 [M+H]⁺. ¹H NMR (DMSO-d₆, 400 MHz): δ_{H} 11.52 (1H, br s), 7.95 (1H, d, J=2.3 Hz), 7.70 (1H, dd, J=8.7, 2.4 Hz), 7.21 (1H, s), 3.61 (4H, s), 2.36 (4H, s), 2.19 (3H, s). Note: B32 was prepared according to the procedure outlined in Erb. B., et al, J Heterocyclic Chem. 2000, 37(2), 253-260.

### Synthesis of Compound 165

[chemical structure]

[0564] A mixture of 6-bromo-2-(4-methylpiperazin-1-yl)quinazolin-4(3H)-one (B33; 38 mg, 0.12 mmol), 2,7-dimethyl-5-(4,4,5,5-tetramethyl-1,3,2-dioxaborolan-2-yl)-2H-indazole (B23; 35.2 mg, 0.13 mmol), cesium carbonate (76 mg, 0.23 mmol) and PdCl₂(dppf)-CH₂Cl₂ (9.6 mg, 0.01 mmol) in dioxane (800 μL) and water (40 μL), in a capped vial, was purged with argon for 10 min and then stirred at 95° C. for 4 h. The mixture was then cooled, dimethylformamide was added, and the mixture was filtered through Celite and rinsed with dimethylformamide. The filtrate was then concentrated and purified by silica gel column chromatography eluting with methanol in dichloromethane (5 to 20%). The recovered material was suspended in ethyl acetate and stirred for 30 min at 0° C., and the solid was collected by filtration and rinsed with cold ethyl acetate, to afford 6-(2,7-dimethyl-2H-indazol-5-yl)-2-(4-methylpiperazin-1-yl)quinazolin-4(3H)-one (Compound 165; 25 mg) as a solid. LCMS (ES, m/z): 389.2 [M+H]⁺. ¹H NMR (DMSO-d₆, 400 MHz): δ_{H} 11.42 (1H, s), 8.33 (1H, s), 8.16 (1H, s), 7.95 (1H, d, J=8.5 Hz), 7.80 (1H, s), 7.38 (1H, s), 7.34 (1H, d, J=8.5 Hz), 4.18 (3H, s), 3.62 (4H, br s), 2.56 (3H, s), 2.38 (4H, br s), 2.20 (3H, s).

### Example 13

### Synthesis of Compound 166

### Synthesis of Intermediate B34

[chemical structure]

[0566] tert-Butyl piperazine-1-carboxylate (258 mg, 1.39 mmol) and triethylamine (0.19 mL, 1.4 mmol) were added to a solution of 6-bromo-2-(methylthio)quinazolin-4(3H)-one (B32 from Example 16; 188 mg, 0.64 mmol) in dimethylacetamide (1.5 mL), and the reaction mixture was heated to 120° C. for 5 days. The mixture was then concentrated, suspended on silica gel, and purified by normal phase chromatography on a Redisep Gold column (12 g), eluting with methanol (0-4%) in dichloromethane, to afford tert-butyl 4-(6-bromo-4-oxo-3,4-dihydroquinazolin-2-yl)piperazine-1-carboxylate as a solid (B34; 78 mg). LCMS (ES, m/z): 409.2 [M+H]⁺.

### Synthesis of Intermediate B35

[chemical structure]

[0568] A mixture of tert-butyl 4-(6-bromo-4-oxo-3,4-dihydroquinazolin-2-yl)piperazine-1-carboxylate (B34; 84 mg, 0.21 mmol), 2,7-dimethyl-5-(4,4,5,5-tetramethyl-1,3,2-dioxaborolan-2-yl)-2H-indazole (B23; 67 mg, 0.25 mmol), dioxane (2.1 mL), water (0.1 mL), cesium carbonate (168 mg, 0.52 mmol) and PdCl₂(dppf)·DCM (16.8 mg, 0.02 mmol) was purged with argon for 10 min, and then heated to 95° C. for 4 h. The reaction mixture was then cooled to room temperature, dimethylformamide was added, and the pH was adjusted to 7 using 1N hydrochloric acid. The mixture was then filtered through Celite®, rinsed with dimethylformamide, and the filtrate was concentrated. The crude material was suspended on silica gel and purified on a Redisep Gold column (12 g) eluting with methanol (2-6%) in dichloromethane. The recovered material was then stirred in ethyl acetate for 30 min, cooled to 0° C., and collected by vacuum filtration. The solid was rinsed with cold ethyl acetate, to afford tert-butyl 4-(6-(2,7-dimethyl-2H-indazol-5-yl)-4-oxo-3,4-dihydroquinazolin-2-yl)piperazine-1-carboxylate (B35; 70.7 mg). LCMS (ES, m/z): 475.2 [M+H]⁺. ¹H NMR (DMSO-d₆, 400 MHz): δ_{H} 11.50 (1H, s), 8.33 (1H, s), 8.17 (1H, s), 7.96 (1H, d, J=8.5 Hz), 7.81 (1H, s), 7.36-7.38 (2H, m), 4.18 (3H, s), 3.62 (4H, s), 3.14 (4H, s), 2.56 (3H, s), 1.42 (9H, s).

### Synthesis of Compound 166

[chemical structure]

[0570] Hydrochloric acid in dioxane (4N, 2 mL, 78 mmol) was added to tert-butyl 4-(6-(2,7-dimethyl-2H-indazol-5-yl)-4-oxo-3,4-dihydroquinazolin-2-yl)piperazine-1-carboxylate (B36; 68 mg, 0.41 mmol), and the mixture was stirred for 24 h at room temperature, then concentrated to dryness. The material was then added to water and the pH was adjusted to 6 using 1N sodium hydroxide. The resulting solid was stirred for 2 h, collected by filtration, rinsed with cold water, and dried to afford 6-(2,7-dimethyl-2H-indazol-5-yl)-2-(piperazin-1-yl)quinazolin-4(3H)-one (Compound 166; 22 mg). LCMS (ES, m/z): 375.2 [M+H]⁺. ¹H NMR (DMSO-d₆, 400 MHz): δ_{H} 8.33 (1H, s), 8.15 (1H, s), 7.94 (1H, d,=7.2 Hz), 7.80 (1H, s), 7.38 (1H, s), 7.34 (1H, m), 4.18 (3H, s), 3.58 (4H, s), 2.79 (4H, s), 2.56 (3H, s).

### Example 14

### Synthesis of Compound 167

### Synthesis of Intermediate B36

[chemical structure]

[0572] Triethylamine (0.5 mL, 0.35 mmol) was added to a mixture of 6-bromo-2-(methylthio)quinazolin-4(3H)-one (B32 from Example 16; 240 mg, 0.89 mmol) and 1-methylpiperidin-4-amine (B31′; 0.5 mL, 0.35 mmol) in N-methyl-2-pyrrolidone (1.8 mL), and the resulting mixture was heated to 180° C. for 12 h. The reaction mixture was then cooled to room temperature, water was added, and the solid was collected by vacuum filtration. The crude material was then dried and suspended on silica gel, and purified by column chromatography on a Redisep column (12 g) eluting with methanol (7.5 to 30%) in dichloromethane, to afford (B36; 50 mg). LCMS (ES, m/z): 336.9 [M+H]⁺.

### Synthesis of Compound 167

[chemical structure]

[0574] Argon was bubbled through a suspension of 6-bromo-2-((1-methylpiperidin-4-yl)amino)quinazolin-4(3H)-one (B36; 48 mg, 0.14 mmol), 2,7-dimethyl-5-(4,4,5,5-tetramethyl-1,3,2-dioxaborolan-2-yl)-2H-indazole (B23; 46 mg, 0.17 mmol), cesium carbonate (115 mg, 0.35 mmol) and Pd(dppf)·DCM (11.5 mg, 0.014 mmol) in dioxane (1.4 mL) and water (0.07 mL) for 10 min, and the mixture was then heated tot 110° C. and stirred for 20 h. The reaction mixture was then cooled to room temperature, dimethylformamide was added, and the pH of the mixture was adjusted to 7 using 1N hydrochloric acid. The suspension was filtered through Celite®, rinsed with dimethylformamide, and the filtrate was concentrated. The recovered material was purified by chromatography on a Redisep C-18 column (15.5 g) eluting with 0.1% trifluoroacetic acid in H₂O/0.1% trifluoroacetic acid in acetonitrile (using a gradient of 0 to 50% acetonitrile). Selected fractions were then lyophilised, and the resulting solid was added to water, neutralized with 1N sodium hydroxide, and collected by filtration, to afford 642,7-dimethyl-2H-indazol-5-yl)-2-((1-methylpiperidin-4-yl)amino)quinazolin-4(3H)-one (Compound 167; 5.2 mg). LCMS (ES, m/z): 403.2 [M+H]⁺. ¹H NMR (DMSO-d₆, 400 MHz): δ_{H} 10.64 (1H, s), 8.32-8.32 (1H, m), 8.12 (1H, s), 7.91 (1H, dd,=8.6, 2.3 Hz), 7.77 (1H, s), 7.35 (1H, s), 7.31 (1H, d, J=8.5 Hz), 6.27 (1H, d, J=7.3 Hz), 4.17 (3H, s), 3.82 (1H, br s), 2.72 (2H, s), 2.55 (3H, s), 2.21 (3H, s), 2.15 (2H, br s), 1.94 (2H, d, J=12.3 Hz), 1.45-1.53 (2H, m).

### Example 15

### Synthesis of Compound 182

### Synthesis of Intermediate B41

[chemical structure]

[0576] A mixture of 2-amino-4-bromo-N-(2-methyl-2H-indazol-5-yl)benzamide (B16 from Example 2; 1 g, 2.9 mmol), tert-butyl 4-(4,4,5,5-tetramethyl-1,3,2-dioxaborolan-2-yl)-3,6-dihydropyridine-1(2H)-carboxylate (B13; 895 mg, 2.9 mmol), Pd(dppf)Cl₂ (100 mg, 0.14 mmol) and potassium carbonate (1.2 g, 8.69 mmol) in dioxane (20 mL) and H₂O (4 mL) was heated to 80° C. for 2 h and then cooled to room temperature. The mixture was diluted with ethyl acetate (100 mL) and washed with saturated sodium bicarbonate (50 mL) and brine (50 mL). The organic layer was separated, dried over magnesium sulfate, filtered, and concentrated under reduced pressure. The crude product was purified by normal phase chromatography eluting with methanol (0 to 10%) in dichloromethane, to afford tert-butyl 4-(3-amino-4-((2-methyl-2H-indazol-5-yl)carbamoyl)phenyl)-3,6-dihydropyridine-1(2H)-carboxylate (B41; 260 mg) as a solid. LCMS (ES, m/z): 448.3 [M+H]⁺.

### Synthesis of Intermediate B42

[chemical structure]

[0578] tert-Butyl 4-(3-amino-4-((2-methyl-2H-indazol-5-yl)carbamoyl)phenyl)-3,6-dihydropyridine-1(2H)-carboxylate (B41; 120 mg, 0.27 mmol) was dissolved in a mixture of ethanol (5 mL) and dichloromethane (2 mL), and acetic acid (0.5 mL) and platinum dioxide (20 mg, 0.09 mmol) were added. The resulting mixture was stirred under hydrogen (1 atm) for 18 h. Celite (100 mg) was then added, and the mixture was filtered through Celite and washed with dichloromethane (10 mL). The filtrate was then concentrated under reduced pressure, to afford tert-butyl 4-(3-amino-4-((2-methyl-2H-indazol-5-yl)carbamoyl)phenyl)piperidine-1-carboxylate (B42; 115 mg) as a solid. LCMS (ES, m/z): 450.3 [M+H]⁺.

### Synthesis of Compound 182

[chemical structure]

[0580] A 4M solution of hydrochloric acid in dioxane (4 mL) was added to a solution of tert-butyl 4-(3-amino-4-((2-methyl-2H-indazol-5-yl)carbamoyl)phenyl)piperidine-1-carboxylate (B42; 115 mg, 0.26 mmol) in methanol (2 mL), and the reaction mixture was stirred at room temperature for 1 h. The volatiles were then removed under reduced pressure to afford a solid, which was purified by reverse phase chromatography eluting with acetonitrile (5 to 50%) in 0.1% aqueous formic acid. The purified solid was then dissolved in water (3 mL), neutralized with ammonium carbonate (20 mg, 0.19 mmol), and lyophilized, to afford 2-amino-N-(2-methyl-2H-indazol-5-yl)-4-(piperidin-4-yl)benzamide (Compound 182; 29 mg) as a solid. LCMS (ES, m/z): 350.2 [M+H]⁺. ¹H NMR (DMSO-d₆, 400 MHz): δ_{H} 9.86 (1H, s), 8.35 (1H, s), 8.24 (1H, s), 8.11 (1H, s), 7.57 (1H, d,=8.2 Hz), 7.52 (1H, d,=9.3 Hz), 7.40 (1H, d,=9.3 Hz), 6.58 (1H, s), 6.45 (1H, d, J=8.2 Hz), 6.32 (2H, s), 4.12 (3H, s), 3.17 (2H, d, J=12.4 Hz), 2.75 (2H, t, J=12.1 Hz), 2.58 (1H, t, J=11.4 Hz), 1.76 (2H, d, J=12.9 Hz), 1.56-1.65 (2H, m).

### Example 16

### Synthesis of Compound 172

### Synthesis of Intermediate B43

[chemical structure]

[0582] Triethyl orthoformate (1.2 g, 8.1 mmol) and p-toluenesulfonic acid (15 mg, 0.08 mmol) were added to a solution of tert-butyl 4-(3-amino-4-((2-methyl-2H-indazol-5-yl)carbamoyl)phenyl)piperidine-1-carboxylate (B42 from Example 24; 364 mg, 0.81 mmol) in tetrahydrofuran (5 mL), and the reaction mixture was stirred at room temperature for 1 h. Ethyl acetate (50 mL) was then added, and the mixture was washed with saturated sodium bicarbonate (2×50 mL) and brine (50 mL), dried over magnesium sulfate, filtered and concentrated under reduced pressure, to afford tert-butyl 4-(3-(2-methyl -2H-indazol-5-yl)-4-oxo-3,4-dihydroquinazolin-7-yl)piperidine-1-carboxylate (B43; 364 mg) as a solid. LCMS (ES, m/z): 460.3 [M+H]⁺.

### Synthesis of Compound 172

[chemical structure]

[0584] Trifluoroacetic acid (3 mL, 39 mmol) was added to a solution of tert-butyl 4-(3-(2-methyl-2H-indazol-5-yl)-4-oxo-3,4-dihydroquinazolin-7-yl)piperidine-1-carboxylate (B43; 142 mg, 0.3 mmol) in dichloromethane (3 mL), and the reaction mixture was stirred at room temperature for 0.5 h. The volatiles were removed under reduced pressure, and the crude product was purified by reverse phase chromatography eluting with acetonitrile (5 to 50%) in 0.1% aqueous trifluoroacetic acid. A 25 mg portion of the resulting solid was then added to water (1 mL), and the pH was adjusted to 14 by the dropwise addition of 1M sodium hydroxide. The resulting solid was centrifuged, decanted, then added to water (1 mL), and sonicated for 30 seconds. This process was repeated three times, and the solid was then lyophilized, to afford 3-(2-methyl-2H-indazol-5-yl)-7-(piperidin-4-yl)quinazolin-4(3H)-one (Compound 172; 19 mg) as a solid. LCMS (ES, m/z): 360.1 [M+H]⁺. ¹H NMR (DMSO-d₆, 400 MHz): δ_{H} 8.47 (1H, s), 8.40 (0.3H***, bs), 8.35 (1H, s), 8.13 (1H, d, J=8.2 Hz), 7.85 (1H, s), 7.70 (1H, d, J=9.1 Hz), 7.55 (1H, s), 7.48 (1H, d, J=8.3 Hz), 7.28 (1H, d, J=9.1 Hz), 4.21 (3H, s), 3.11 (2H, d, J=12.3 Hz), 2.84 (1H, t, J=12.0 Hz), 2.69 (2H, t, J=12.4 Hz), 1.81 (2H, d, J=12.6 Hz), 1.59-1.68 (2H, m). ***Exchangeable NH proton

### Example 17

### Synthesis of Compound 173

### Synthesis of Intermediate B44

[chemical structure]

[0586] A mixture of 2-amino-6-bromonicotinic acid (B51; 100 mg, 0.46 mmol) and 4-amino-1-methylpiperidine (B31′; 60 mg, 0.53 mmol) in dimethylacetamide (2.3 mL) was cooled to 0° C., and treated with diisopropylethylamine (250 μL, 1.43 mmol) dropwise, followed by hexafluorophosphate azabenzotriazole tetramethyl uronium (194 mg, 0.51 mmol), and the mixture was warmed to room temperature and stirred for 3 h. The reaction mixture was then diluted with ethyl acetate (20 mL) and washed with saturated sodium bicarbonate (20 mL) and brine (20 mL). The organic layer was dried over anhydrous sodium sulfate and concentrated in vacuo, to afford 2-amino-6-bromo-N-(1-methylpiperidin-4-yl)nicotinamide (B44; 140 mg) as a solid. LCMS (ES, m/z): 313.1 [M+H]⁺.

### Synthesis of Intermediate B45

[chemical structure]

[0588] A mixture of 2-amino-6-bromo-N-(1-methylpiperidin-4-yl)nicotinamide (B44; 140 mg, 0.45 mmol) and N,N-dimethylformamide dimethyl acetal (1.2 mL, 9 mmol) in a 10 mL sealed tube was heated to 80° C. for 4 h. The reaction mixture was then dissolved in dichloromethane (20 mL) and washed with aqueous sodium hydroxide (20%; 15 mL), then brine (20 mL). The organic phase was dried over sodium sulfate and the residue concentrated in vacuo, to afford 7-bromo-2-(dimethylamino)-3-(1-methylpiperidin-4-yl)-2,3-dihydropyrido[2,3-d]pyrimidin-4(1H)-one (B45; 144 mg) as a solid. LCMS (ES, m/z): 368.1 [M+H]⁺.

### Synthesis of Compound 173

[chemical structure]

[0590] A mixture of 7-bromo-2-(dimethylamino)-3-(1-methylpiperidin-4-yl)-2,3-dihydropyrido[2,3-d]pyrimidin-4(1H)-one (B45; 88 mg, 0.24 mmol), 2,7-dimethyl-5-(4,4,5,5-tetramethyl-1,3,2-dioxaborolan-2-yl)-2H-indazole (B23; 72 mg, 0.27 mmol), PdCl₂(dppf) (20 mg, 0.024 mmol) and cesium carbonate (235 mg, 0.72 mmol) in dioxane (3.4 mL) and H₂O (0.3 mL) was heated to 90° C. for 16 h under an atmosphere of nitrogen, and then heated to 120° C. overnight. Next, the mixture was diluted with dimethylformamide and filtered through Celite, and the residue was concentrated under reduced pressure, then stirred in 1N hydrochloric acid (20 mL) for 15 minutes. The aqueous layer was extracted with dichloromethane (3×15 mL), and the aqueous phase was neutralized with ammonium carbonate and washed with dichloromethane (3×15 mL). The aqueous phase was then concentrated in vacuo, and the residue was purified by reverse phase flash chromatography on a C18 column (30 g) eluting with acetonitrile (0-70%, slow gradient) in 0.1% aqueous formic acid. Fractions containing the product were combined, neutralized with ammonium carbonate, and lyophilized. The resulting solid was triturated with methyl tert-butyl ether (3 mL), then ethyl acetate (3 mL), and traces of solvent were removed under reduced pressure, to afford 7-(2,7-dimethyl-2H-indazol-5-yl)-3-(1-methylpiperidin-4-yl)pyrido[2,3-d]pyrimidin-4(3H)-one (Compound 173; 27 mg) as a solid. LCMS (ES, m/z): 389.2 [M+H]⁺. ¹H NMR (CH₃OH-d₄, 400 MHz): δ 8.59-8.62 (2H, m), 8.44 (1H, s), 8.34 (1H, s), 8.13 (1H, d, J=8.5 Hz), 8.00 (1H, s), 4.71 (1H, s), 4.25 (3H, s), 3.12 (2H, d, J=11.2 Hz), 2.65 (3H, s), 2.41 (3H, s), 2.34 (2H, t, J=12.0 Hz), 2.24 (2H, t, J=12.7 Hz), 2.02 (2H, d, J=11.8 Hz).

### Example 18

### Synthesis of Compound 174

### Synthesis of Intermediate B46

[chemical structure]

[0592] A mixture of 2-amino-4-bromobenzoic acid (B15; 100 mg, 0.46 mmol) and 4-amino-1-Boc-piperidine (B29; 102 mg, 0.51 mmol) in dimethylacetamide (2.3 mL) was cooled to 0° C., and treated with diisopropylethylamine (250 μL, 1.431 mmol) dropwise, followed by hexafluorophosphate azabenzotriazole tetramethyl uronium (194 mg, 0.51 mmol), and the mixture was warmed to room temperature and stirred for 2 h. The reaction mixture was then diluted with ethyl acetate (20 mL) and washed with saturated aqueous ammonium chloride (20 mL), followed by saturated sodium bicarbonate (20 mL), and brine (20 mL). The organic layer was dried over anhydrous sodium sulfate and concentrated in vacuo, to afford tert-butyl 4-(2-amino-4-bromobenzamido)piperidine-1-carboxylate (B46; 178 mg) as a solid. LCMS (ES, m/z): 342.1 [M+H−^{t}Bu]⁺.

### Synthesis of Intermediate B47

[chemical structure]

[0594] A mixture of tert-butyl 4-(2-amino-4-bromobenzamido)piperidine-1-carboxylate (B46; 70 mg, 0.18 mmol) and N,N-dimethylformamide dimethyl acetal (470 μL, 3.53 mmol) in a 10 mL sealed tube was heated to 80° C. for 4 h. The mixture was then dissolved in ethyl acetate (20 mL) and washed with saturated sodium bicarbonate (20 mL), then brine (2×20 mL). The organic phase was dried over sodium sulfate and concentrated in vacuo, to afford tert-butyl 4-(7-bromo-2-(dimethylamino)-4-oxo-1,4-dihydroquinazolin-3(2H)-yl)piperidine-1-carboxylate (B47; 75 mg) as a solid. LCMS (ES, m/z): 453.2 [M+H]⁺.

### Synthesis of Compound 174

[chemical structure]

[0596] A mixture of tert-butyl 4-(7-bromo-2-(dimethylamino)-4-oxo-1,4-dihydroquinazolin-3(2H)-yl)piperidine-1-carboxylate (B47; 80 mg, 0.18 mmol), 2,7-dimethyl-5-(4,4,5,5-tetramethyl-1,3,2-dioxaborolan-2-yl)-2H-indazole (B23; 54 mg, 0.2 mmol), PdCl₂(dppf) (14 mg, 0.02 mmol) and cesium carbonate (175 mg, 0.54 mmol) in dioxane (2.5 mL) and H₂O (0.2 mL) was heated to 90° C. for 16 h, and then heated to 120° C. for 32 hours. Next, the reaction mixture was concentrated under reduced pressure, and the residue was purified by flash chromatography on a silica gel column (12 g) eluting with methanol (0-25%) in dichloromethane. The fractions containing the product were combined and evaporated under reduced pressure, and the resulting solid was stirred vigorously in 2N aqueous hydrochloric acid (15 mL) at room temperature for 6 hours. The resulting solution was washed with dichloromethane (2×15 mL) and concentrated in vacuo. The residue was purified by reverse phase flash chromatography on a C18 column (12 g) eluting with acetonitrile (5-70%) in 0.1% aqueous formic acid. The fractions containing the product were combined, neutralized with ammonium carbonate, and lyophilized. The resulting solid was triturated with methyl tert-butyl ether (3 mL) followed by ethyl acetate (3 mL). Traces of solvent were removed under reduced pressure, to afford 7-(2,7-dimethyl-2H-indazol-5-yl)-3-(piperidin-4-yl)quinazolin-4(3H)-one (Compound 174; 15 mg) as a solid. LCMS (ES, m/z): 374.2 [M+H]⁺. ¹H NMR (CH₃OH-d₄, 400 MHz): δ 8.40 (1H, s), 8.28-8.30 (2H, m), 7.88-7.92 (3H, m), 7.47 (1H, s), 4.25 (3H, s), 3.23 (2H, d, J=13.1 Hz), 2.79 (2H, t, J=12.0 Hz), 2.65 (3H, s), 1.96-2.01 (4H, m). (*Methine proton of the piperidine substituent obscured by water signal).

### Example 19

### Synthesis of Compound 175

### Synthesis of Intermediate B49

[chemical structure]

[0598] A mixture of 2-amino-4-bromobenzoic acid (B15; 150 mg, 0.69 mmol) and 1-amino-4-methylpiperazine (B48; 90 mg, 0.78 mmol) in dimethylformamide (3.5 mL) was cooled to 0° C. and treated with diisopropylethylamine (360 μL, 2 mmol) dropwise, followed by hexafluorophosphate azabenzotriazole tetramethyl uronium (290 mg, 0.76 mmol), and the mixture was warmed to room temperature and stirred for 3 h. Next, the mixture was diluted with ethyl acetate (20 mL) and washed with saturated aqueous ammonium chloride (20 mL), sodium bicarbonate (20 mL), then brine (20 mL). The organic layer was dried over anhydrous sodium sulfate and concentrated in vacuo, to afford 2-amino-4-bromo-N-(4-methylpiperazin-1-yl)benzamide (B49; 166 mg, 0.53 mmol) as a solid. LCMS (ES, m/z): 313.1 [M+H]⁺.

### Synthesis of Intermediate B50

[chemical structure]

[0600] A mixture of 2-amino-4-bromo-N-(4-methylpiperazin-1-yl)benzamide (B49; 140 mg, 0.45 mmol) and N,N-dimethylformamide dimethyl acetal (1.8 mL, 13.5 mmol) in a 10 mL sealed tube was heated to 80° C. for 4 h. The reaction mixture was then dissolved in ethyl acetate (20 mL) and washed with sodium bicarbonate (15 mL), then brine (20 mL). The organic phase was dried over sodium sulfate and the residue concentrated in vacuo, to afford 7-bromo-3-(4-methylpiperazin-1-yl)quinazolin-4(3H)-one (B50; 110 mg) as a solid. LCMS (ES, m/z): 323.1 [M+H]⁺.

### Synthesis of Compound 175

[chemical structure]

[0602] A mixture of 7-bromo-3-(4-methylpiperazin-1-yl)quinazolin-4(3H)-one (B50; 97 mg, 0.30 mmol), 2,7-dimethyl-5-(4,4,5,5-tetramethyl-1,3,2-dioxaborolan-2-yl)-2H-indazole (B23; 90 mg, 0.33 mmol), PdCl₂(dppf) (25 mg, 0.031 mmol) and cesium carbonate (196 mg, 0.60 mmol) in dioxane (4.3 mL) and H₂O (0.4 mL) was heated to 90° C. for 16 h under a nitrogen atmosphere, and then heated to 120° C. overnight. Next, the mixture was diluted with dimethylformamide and filtered through Celite, then concentrated under reduced pressure. The residue was then stirred for 15 min in 1N hydrochloric acid (20 mL). The aqueous layer was extracted with dichloromethane (3×15 mL), and the aqueous phase was filtered under vacuum, neutralized with sodium carbonate, and washed with dichloromethane (3×15 mL), and concentrated in vacuo. The residue was purified by reverse phase flash chromatography on a C18 column (12 g) eluting with acetonitrile (5-70%) in 0.1% aqueous formic acid. Fractions containing the product were combined, neutralized with ammonium carbonate, and lyophilized. The resulting solid was triturated with methyl tert-butyl ether (3 mL), then ethyl acetate (3 mL), and traces of solvent were removed under reduced pressure, to afford 7-(2,7-dimethyl-2H-indazol-5-yl)-3-(4-methylpiperazin-1-yl)quinazolin-4(3H)-one (Compound 175; 55 mg) as a solid. LCMS (ES, m/z): 389.2 [M+H]⁺. ¹H NMR (CH₃OH-d₄, 400 MHz): δ 8.31-8.26 (3H, m), 7.88-7.92 (3H, m), 7.47 (1H, s), 4.07-4.25 (5H, br), 3.18 (1H, br), 2.98 (2H, br) 2.65 (6H, br), 2.44 (3H, s).

### Example 20

### Synthesis of Compound 176

### Synthesis of Intermediate B52

[chemical structure]

[0604] A mixture of tert-butyl 2-amino-4-bromo-N-(1-methylpiperidin-4-yl)benzamide (B21 from Example 6; 352 mg, 0.88 mmol) and N,N-dimethylformamide dimethyl acetal (2 mL, 15 mmol) in a 10 mL sealed tube was heated to 80° C. for 4 h. The reaction mixture was then dissolved in ethyl acetate (20 mL) and washed with saturated sodium bicarbonate (20 mL), then brine (2×20 mL). The organic phase was dried over sodium sulfate and concentrated in vacuo. The resulting solid was triturated with methyl tert-butyl ether (5 mL) and traces of solvent were removed under reduced pressure, to afford 7-bromo-2-(dimethylamino)-3-(1-methylpiperidin-4-yl)-2,3-dihydroquinazolin-4(1H)-one (B52; 201 mg, 0.55 mmol) as a solid. LCMS (ES, m/z): 367.1 [M+H]⁺.

### Synthesis of Compound 176

[chemical structure]

[0606] A mixture of 7-bromo-2-(dimethylamino)-3-(1-methylpiperidin-4-yl)-2,3-dihydroquinazolin-4(1H)-one (B52; 90 mg, 0.25 mmol), 2,8-dimethyl-6-(4,4,5,5-tetramethyl-1,3,2-dioxaborolan-2-yl)imidazo[1,2-b]pyridazine (B53; 180 mg, 0.27 mmol), PdCl₂(dppf) (21 mg, 0.026 mmol) and cesium carbonate (240 mg, 0.74 mmol) in dioxane (3.5 mL) and H₂O (0.3 mL) was heated to 90° C. for 16 h, and then heated to 120° C. for 32 hours. Next, the reaction mixture was filtered over a pad of Celite using dimethylformamide as eluent, concentrated in vacuo, and dissolved in 2N aqueous hydrochloric acid (20 mL). The aqueous phase was extracted with dichloromethane (3×15 mL) and filtered under vacuum. The resulting solution was concentrated under reduced pressure and the residue was purified by flash chromatography on a C18 column (12 g) eluting with acetonitrile (5-70%) in 0.1% aqueous formic acid. Fractions containing the product were combined, neutralized with ammonium carbonate, and lyophilized. The resulting solid was triturated with methyl tert-butyl ether (3 mL), followed by ethyl acetate (3 mL), and traces of solvent were removed under reduced pressure, to afford 7-(2,8-dimethylimidazo[1,2-b]pyridazin-6-yl)-3-(1-methylpiperidin-4-yl)quinazolin-4(3H)-one (Compound 176; 31 mg) as a solid. LCMS (ES, m/z): 389.2 [M+H]⁺. ¹H NMR (CH₃OH-d₄, 400 MHz): δ_{H} 8.42 (1H, s), 8.34 (1H, d, J=8.5 Hz), 8.29 (1H, s), 8.20 (1H, d, J=8.5 Hz), 7.95 (1H, s), 7.67 (1H, s), 4.80-4.70 (1H, m) 3.12 (2H, d, J=11.4 Hz), 2.69 (3H, s), 2.50 (3H, s), 2.41 (3H, s), 2.35 (2H, t, J=11.8 Hz), 2.20-2.26 (2H, m), 2.01 (2H, d, J=12.1 Hz).

### Example 21

### Synthesis of Compound 177

[chemical structure]

[0608] A mixture of 3-(2-methyl-2H-indazol-5-yl)-7-(piperidin-4-yl)quinazolin-4(3H)-one (Compound 172 from Example 25; 185 mg, 0.47 mmol), and formaldehyde (37% in water, 0.19 mL, 2.34 mmol) in dichloromethane (6 mL) and ethanol (2 mL) was stirred at room temperature for 1 h. Sodium triacetoxyborohydride (594 mg, 2.8 mmol) was then added and the mixture was stirred for an additional 1 h at room temperature. The mixture was then diluted with dichloromethane (50 mL), and washed with saturated sodium bicarbonate (2×50 mL) and brine (50 mL). The organic layer was separated, dried over magnesium sulfate, filtered and concentrated under reduced pressure. The crude product was purified by reverse phase chromatography eluting with acetonitrile (5 to 50%) in 0.1% aqueous formic acid, and the resulting solid was dissolved in water (3 mL), neutralized with ammonium carbonate (50 mg, 0.48 mmol) and lyophilized, to afford 3-(2-methyl-2H-indazol-5-yl)-7-(1-methylpiperidin-4-yl)quinazolin-4(3H)-one (Compound 177; 31 mg) as a solid. LCMS (ES, m/z): 374.2 [M+H]⁺. ¹H NMR (DMSO-d₆, 400 MHz): δ_{H} 8.47 (1H, s), 8.35 (1H, s), 8.12 (1H, d, J=8.2 Hz), 7.85 (1H, s), 7.70 (1H, d, J=9.1 Hz), 7.57 (1H, s), 7.50 (1H, d, J=8.3 Hz), 7.28 (1H, d, J=9.2 Hz), 4.21 (3H, s), 2.90 (2H, d, J=11.0 Hz), 2.64-2.70 (1H, m), 2.21 (3H, s), 2.02 (2H, t, J=11.3 Hz), 1.69-1.83 (4H, m).

### Example 22

### Synthesis of Compound 178

[chemical structure]

[0610] 3-(2-Methyl-2H-indazol-6-yl)-7-(piperazin-1-yl)quinazolin-4(3H)-one (B54) was prepared according to the procedure described for the preparation of Compound 153 (see Examples 3 and 4), substituting 2-methyl-2H-indazol-5-amine (B10) with 2-methyl-2H-indazol-6-amine as the starting material. Intermediate B54 was obtained as a solid. LCMS (ES, m/z): 398.1 [M+H]⁺. A mixture of 3-(2-methyl-2H-indazol-6-yl)-7-(piperazin-1-yl)quinazolin-4(3H)-one (B54; 52 mg, 0.13 mmol), and formaldehyde (37% in water, 20 mg, 0.053 mL, 0.66 mmol) in dichloromethane (6 mL) and ethanol (2 mL) was stirred at room temperature for 1 h. Sodium triacetoxyborohydride (167 mg, 0.79 mmol) was then added and the mixture was stirred for 1 h at room temperature. The mixture was then diluted with dichloromethane (50 mL), and washed with saturated sodium bicarbonate (2×50 mL) and brine (50 mL). The organic layer was separated, dried over magnesium sulfate, filtered and concentrated under reduced pressure. The crude product was purified by reverse phase chromatography eluting with acetonitrile (5 to 50%) in 0.1% aqueous formic acid, and the resulting solid was dissolved in water (3 mL), neutralized with ammonium carbonate (50 mg, 0.48 mmol) and lyophilized, to afford 3-(2-methyl-2H-indazol-6-yl)-7-(4-methylpiperazin-1-yl)quinazolin-4(3H)-one (Compound 178; 38 mg) as a solid. LCMS (ES, m/z): 375.2 [M+H]⁺. ¹H NMR (DMSO-d₆, 400 MHz): δ_{H} 8.44 (1H, s), 8.25 (1H, s), 7.97 (1H, d, J=9.0 Hz), 7.80 (1H, d, J=8.8 Hz), 7.72 (1H, s), 7.24 (1H, d, J=9.1 Hz), 7.07 (1H, d, J=8.8 Hz), 7.00 (1H, s), 4.20 (3H, s), 3.39 (4H, m), 2.22 (3H, s). (part of the 4H multiplet can be observed under the DMSO peak. *Or 2.45 (4H, m)).

### Example 23

### Synthesis of Compound 179

### Synthesis of Intermediate B55

[chemical structure]

[0612] A mixture of 2-amino-6-bromonicotinic acid (B51; 200 mg, 0.92 mmol) and 4-amino-2,2,6,6-tetramethylpiperidine (B23; 160 mg, 1.02 mmol) in dimethylformamide (4.6 mL) was cooled to 0° C., and treated with diisopropylethylamine (500 μL, 2.86 mmol) dropwise, followed by hexafluorophosphate azabenzotriazole tetramethyl uronium (388 mg, 1.02 mmol). The mixture was then warmed to room temperature and stirred for 3 h. The reaction mixture was then diluted with ethyl acetate (20 mL) and washed with saturated aqueous sodium bicarbonate (20 mL) and brine (20 mL). The organic layer was dried over anhydrous sodium sulfate and concentrated in vacuo, to afford 2-amino-6-bromo-N-(2,2,6,6-tetramethylpiperidin-4-yl)nicotinamide (B55; 318 mg) as a solid. LCMS (ES, m/z): 355.1 [M+H]⁺.

### Synthesis of Intermediate B56

[chemical structure]

[0614] A mixture of 2-amino-6-bromo-N-(1-methylpiperidin-4-yl)nicotinamide (B55; 200 mg, 0.56 mmol) and N,N-dimethylformamide dimethyl acetal (2.5 mL, 18.8 mmol) in a 10 mL sealed tube was heated at 80° C. for 4 h. The reaction mixture was then dissolved in dichloromethane (20 mL) and washed with 20% aqueous sodium hydroxide (15 mL), then brine (20 mL). The organic phase was dried over sodium sulfate and the residue concentrated in vacuo, to afford 7-bromo-2-(dimethylamino)-3-(2,2,6, 6-tetramethylpiperidin-4-yl)-2,3-dihydropyrido[2,3-d]pyrimidin-4(1H)-one (B56; 142 mg) as a solid. LCMS (ES, m/z): 410.1 [M+H]⁺.

### Synthesis of Compound 179

[chemical structure]

[0616] A mixture of 7-bromo-2-(dimethylamino)-3-(2,2,6,6-tetramethylpiperidin-4-yl)-2,3-dihydropyrido[2,3-d]pyrimidin-4(1H)-one (B56; 130 mg, 0.32 mmol), 2,7-dimethyl-5-(4,4,5,5-tetramethyl-1,3,2-dioxaborolan-2-yl)-2H-indazole (B23; 95 mg, 0.25 mmol), PdCl₂(dppf) (26 mg, 0.03 mmol) and cesium carbonate (310 mg, 0.95 mmol) in dioxane (4.5 mL) and H₂O (0.4 mL) was heated to 90° C. for 16 h under a nitrogen atmosphere, and then heated to 120° C. overnight. Next, the reaction mixture was diluted with ethyl acetate (25 mL) and washed with saturated sodium bicarbonate (15 mL) and brine (15 mL), and the organic phase was dried over sodium sulfate and concentrated in vacuo. The residue was purified by flash chromatography on a silica gel column (12 g) eluting with methanol (5-50%) in dichloromethane. The fractions containing the product were combined and the solvent was removed under reduced pressure, and the residue was triturated with methyl tert-butyl ether, and traces of solvent were removed in vacuo, to afford 7-(2,7-dimethyl-2H-indazol-5-yl)-3-(2,2,6,6-tetramethylpiperidin yl)pyrido[2,3-d]pyrimidin-4(3H)-one (Compound 179; 75 mg) as a solid. LCMS (ES, m/z): 431.3 [M+H]⁺. ¹H NMR (CHCl₃-d, 300 MHz): δ 8.65 (1H, d, J=8.4 Hz), 8.44 (1H, s), 8.37 (1H, s), 8.01 (4H, m), 5.40 (1H, m), 4.29 (3H, s), 2.73 (3H, s), 1.99 (2H, d, J=11.8 Hz), 1.47 (6H, s), 1.36 (8H, m).

### Example 24

### Synthesis of Compound 180

### Synthesis of Intermediate B57

[chemical structure]

[0618] A mixture of tert-butyl 4-((3-(2-methyl-2H-indazol-5-yl)-4-oxo-3,4-dihydroquinazolin-7-yl)amino)piperidine-1-carboxylate (B30 from Example 13; 83 mg, 0.18 mmol) and sodium hydride 60% (11 mg, 0.26 mmol) in tetrahydrofuran (3 mL) was stirred for 1 h at room temperature in a sealed tube. Iodomethane (13 μL, 0.21 mmol) was then added and the mixture was heated to 45° C. overnight. Next, ethyl acetate (50 mL) and saturated sodium bicarbonate (50 mL) were added, and the organic layer was separated, washed with saturated sodium bicarbonate (50 mL) and brine (50 mL), dried over magnesium sulfate, filtered and concentrated under reduced pressure. The resulting solid was purified by preparative HPLC eluting with acetonitrile (10 to 100%) in 0.1% aqueous formic acid, to afford tert-butyl 4-(methyl(3-(2-methyl-2H-indazol-5-yl)-4-oxo-3,4-dihydroquinazolin-7-yl)amino)piperidine-1-carboxylate (B57; 13 mg) as a solid. LCMS (ES, m/z): 489.2 [M+H]⁺.

### Synthesis of Compound 180

[chemical structure]

[0620] tert-Butyl 4-(methyl(3-(2-methyl-2H-indazol-5-yl)-4-oxo-3,4-dihydroquinazolin-7-yl)amino)piperidine-1-carboxylate (B57; 13 mg, 0.03 mmol) was added to a mixture of 4M hydrochloric acid in dioxane (2 mL) and methanol (1 mL), and the reaction mixture was stirred at room temperature for 1 h. The volatiles were then removed under reduced pressure and the crude product was suspended in ether (1 mL). The mixture was centrifuged, decanted and the resulting hydrochloride salt was added to water (1 mL) and lyophilized to afford 7-(methyl(piperidin-4-yl)amino)-3-(2-methyl-2H-indazol-5-yl)quinazolin-4(3H)-one, hydrochloride (Compound 180 HCl salt); 7 mg) as a solid. LCMS (ES, m/z): 389.1 [M+H]⁺. ¹H NMR (CH₃OH-d₄, 400 MHz): δ_{H} 9.56 (1H, s), 8.60 (1H, s), 8.16 (1H, d, J=9.2 Hz), 8.08 (1H, s), 7.82 (1H, d, J=9.2 Hz), 7.56 (1H, d, J=9.2 Hz), 7.42 (1H, d, J=9.4 Hz), 7.02 (1H, d, J=2.4 Hz), 4.43 (1H, t, J=11.3 Hz), 4.34 (3H, s), 3.63-3.74 (1H, m), 3.56 (2H, d, J=12.9 Hz), 3.35 (2H, d, J=12.9 Hz), 3.06 (3H, s), 2.19 (2H, q, J=12.9 Hz), 2.04 (2H, d, J=13.6 Hz). (Signals for hydrogen atoms of HCl salt are exchanging with the residual water from the CH₃OH-d₄).

### Example 25

### Synthesis of Compound 181

[chemical structure]

[0622] A mixture of tert-butyl 4-(7-bromo-2-(dimethylamino)-4-oxo-1,4-dihydroquinazolin-3(2H)-yl)piperidine-1-carboxylate (B47 from Example 27, 90 mg, 0.2 mmol), 2,8-dimethyl-6-(4,4,5,5-tetramethyl-1,3,2-dioxaborolan-2-yl)imidazo[1,2-b]pyridazine (B53; 150 mg, 0.23 mmol), PdCl₂(dppf) (18 mg, 0.02 mmol) and cesium carbonate (200 mg, 0.61 mmol) in dioxane (2.8 mL) and H₂O (0.2 mL) was heated to 90° C. for 16 h, and then heated to 120° C. for 32 hours. The reaction mixture was then concentrated under reduced pressure and the residue was purified by flash chromatography on a silica gel column (12 g) eluting with methanol (2-25%) in dichloromethane. Fractions containing the product were combined and evaporated under reduced pressure, and the resulting solid was stirred vigorously in a 4M solution of hydrochloric acid in dioxane (2 mL) at room temperature for 6 h. The volatiles were then removed in vacuo and the residue was treated with water (15 mL) and dichloromethane (15 mL). The aqueous phase was washed with dichloromethane (2×15 mL), concentrated in vacuo, and the resulting HCl salt was purified by reverse phase flash chromatography on a C18 column (12 g) eluting with acetonitrile (5-70%) in 0.1% aqueous formic acid. Fractions containing the product were combined, neutralized with ammonium carbonate, and lyophilized. The resulting solid was triturated with methyl tert-butyl ether (3 mL), then ethyl acetate (3 mL), and traces of solvent were removed under reduced pressure, to afford 7-(2,8-dimethylimidazo[1,2-b]pyridazin-6-yl)-3-(piperidin yl)quinazolin-4(3H)-one (Compound 181; 25 mg, 0.065 mmol) as a solid. LCMS (ES, m/z): 375.2 [M+H]⁺. ¹H NMR (CH₃OH-d₄, 400 MHz): δ 8.53 (1H, s), 8.41-8.30 (3H, m), 8.23 (1H, d, J=8.5 Hz), 7.97 (1H, s), 7.70 (1H, s), 3.51 (2H, d, J=13.1 Hz), 3.12 (2H, t, J=12.8 Hz), 2.69 (3H, s), 2.50 (3H, s), 2.40 (2H, d, J=13.5 Hz), 2.16 (2H, d, J=13.1 Hz). (*Methine proton of piperidine substituent hidden under water peak).

### Example 26

### Synthesis of Compound 185

### Synthesis of Intermediate B2

[chemical structure]

[0624] A solution of 1-(2-bromoethyl)-3-methoxybenzene (B1; 3.9 g, 0.018 mmol) and iodine monochloride (2.94 g, 0.018 mmol) in methanol (50 mL) was stirred for 16 h at 25° C., and then concentrated under reduced pressure. The resulting mixture was extracted with dichloromethane (50 mL) and washed with aqueous sodium sulfate (50 mL), and then extracted with H₂O (3×60 mL), and concentrated under vacuum. The residue was purified by reverse flash chromatography on a silica gel column eluting with methanol (10% to 50% gradient over 10 min) in water, to afford 2-(2-bromoethyl)-1-iodo-4-methoxybenzene (B2; 4 g) as an oil. LCMS: (ES, m/z): 341[M+1]⁺.

### Synthesis of Intermediate B4

[chemical structure]

[0626] A solution of 2-(2-bromoethyl)-1-iodo-4-methoxybenzene (B2; 3.8 g, 11 mmol), tert-butyl 4-aminopiperidine-1-carboxylate (B3; 2.68g), and triethylamine (3.38 g, 33 mmol) in dimethylsulfoxide (50 mL) was stirred for 16 h at 40° C., and then cooled to 25° C. The resulting mixture was extracted with ethyl acetate (3×30 mL), and the combined organic layers were washed with H₂O (3×30 mL) and concentrated under vacuum. The residue was purified by reverse flash chromatography on a silica gel column, eluting with methanol (10% to 50% gradient over 10 min) in water, to afford 1-benzyl-4-[2-(5-ethyl-2-methylphenyl) ethyl]piperidine (B4; 1.9 g) as an oil. LCMS: (ES, m/z): 461[M+1]⁺.

### Synthesis of Intermediate B5

[chemical structure]

[0628] A solution of tert-butyl 4-[[2-(2-iodo-5-methoxyphenyl) ethyl]amino]piperidine-1-carboxylate (B4; 1.4 g, 3 mmol), triethylamine (0.92 g) and Pd(PPh₃)₂Cl₂ (0.43 g, 0.001 mmol) in dimethylformamide (20 mL) was stirred for 6 h at 90° C. under a carbon monoxide atmosphere. The mixture was then cooled to 25° C. and extracted with ethyl acetate (20 mL) and H₂O (3×20 mL), then concentrated under vacuum. The residue was purified by reverse flash chromatography on a silica gel column, eluting with methanol (10% to 50% gradient over 10 min) to afford tert-butyl 4-(7-methoxy-1-oxo-3,4-dihydroisoquinolin-2-yl) piperidine-1-carboxylate (B5; 740 mg) as an oil. LCMS: (ES, m/z): 361[M+1]⁺.

### Synthesis of Intermediate B6

[chemical structure]

[0630] A mixture of tert-butyl 4-(6-methoxy-1-oxo-3,4-dihydro-2H-naphthalen-2-yl)piperidine-1-carboxylate (B5; 900 mg, 2.5 mmol) in dichloromethane (10 mL) was treated with boron tribromide (1.88 g, 7.5 mmol) at −78° C., and the mixture was then stirred for 20 h at 25° C. The reaction was quenched with methanol at 0° C., and neutralized using sodium hydroxide (2.5N). The resulting mixture was concentrated under reduced pressure, to afford 6-hydroxy-2-(piperidin-4-yl) -3,4-dihydro-2H-naphthalen-1-one (B6; 8.5 g) as a solid. LCMS: (ES, m/z): 247[M+1]⁺.

### Synthesis of Intermediate B7

[chemical structure]

[0632] A mixture of 6-hydroxy-2-(piperidin-4-yl)-3,4-dihydroisoquinolin-1-one (B6; 600 mg, 2.4 mmol) and sodium bicarbonate (614 mg, 7.3 mmol) in tetrahydrofuran (10 mL) was stirred for 30 min at 25° C. Next, a mixture of di-tert-butyl dicarbonate (1.06 g, 4.9 mmol) in water (10 mL) was added in portions at 25° C. Volatiles were then removed under reduced pressure, and the aqueous layer was extracted with ethyl acetate (3×10 mL), and the resulting mixture was concentrated under vacuum to afford tert-butyl 4-(1,6-dihydroxy-octahydro-1H-isoquinolin yl)piperidine-1-carboxylate (B7; 120 mg) as a solid. LCMS: (ES, m/z): 347[M+1]⁺.

### Synthesis of Intermediate B8

[chemical structure]

[0634] A mixture of tert-butyl 4-(6-hydroxy-1-oxo-3,4-dihydroisoquinolin-2-yl) piperidine-1-carboxylate (B7; 130 mg, 0.38 mmol) and triethylamine (114 mg, 1.13 mmol) in dichloromethane (5 mL) was treated with 1,1,1-trifluoro-N-phenyl-N-trifluoromethane sulfonyl methane sulfonamide (147 mg, 0.41 mmol) in portions, and then stirred for 4 h at 25° C. The aqueous layer was then extracted with ethyl acetate and H₂O (3×15 mL), and the resulting mixture was concentrated under vacuum, to afford tert-butyl 4-[1-oxo-6-(trifluoromethanesulfonyloxy)-3,4-dihydroisoquinolin-2-yl]piperidine-1-carboxylate (B8; 150 mg) as a solid. LCMS: (ES, m/z): 479[M+1]⁺.

### Synthesis of Intermediate B10

[chemical structure]

[0636] A mixture of tert-butyl 4-[1-oxo-6-(trifluoromethanesulfonyloxy)-3,4-dihydroisoquinolin-2-yl]piperidine-1-carboxylate (B8; 140 mg, 0.29 mmol), 2,8-dimethyl-6-(4,4,5,5-tetramethyl -1,3,2-dioxaborolan-2-yl) imidazo[1,2-b]pyridazine (B9; 96 mg, 0.35 mmol), Pd(PPh₃)₄ (101 mg, 0.09 mmol), and potassium carbonate (121 mg, 0.88 mmol) in dioxane (10 mL) and H₂O (2 mL) was stirred for 2 h at 80° C. The mixture was then cooled to 25° C., and the aqueous layer was extracted with ethyl acetate and H₂O (3×20 mL). The resulting mixture was concentrated under vacuum, and purified by reverse flash chromatography on a silica gel column eluting with methanol (10% to 50% gradient over 10 min) in water; to afford tert-butyl 4-(6-[2,8-dimethylimidazo[1,2-b]pyridazin-6-yl]-1-oxo-3,4-dihydroisoquinolin-2-yl) piperidine-1-carboxylate (B10; 60 mg) as a solid. LCMS (ES, m/z): 476[M+1]⁺.

### Synthesis of Compound 185

[chemical structure]

[0638] A mixture of tert-butyl4-(6[2,8-dimethylimidazo[1,2-b]pyridazin-6-yl ]-1-oxo-3,4-dihydroisoquinolin-2-yl)piperidine-1-carboxylate (B10; 90 mg, 0.2 mmol) in dichloromethane (6 mL) was treated with trifluoroacetic acid (65 mg, 0.6 mmol) in portions over 3 h at 25° C. The resulting mixture was concentrated under reduced pressure, and purified by reverse flash chromatography on a C18 column eluting with methanol (10% to 50% gradient over 10 min) in water, to afford 6-[2,8-dimethylimidazo [1,2-b] pyridazin-6-yl ]-2-(piperidin-4-yl) -3,4-dihydroisoquinolin-1-one (Compound 100; 4.4 mg) as a solid. LCMS: (ES, m/z): 376[M+1]⁺. ¹H NMR (400 MHz, DMSO-d₆, ppm) δ 8.08 (d, J=1.0 Hz, 1H), 8.03-7.96 (m, 3H), 7.69 (d, J=1.2 Hz, 1H), 3.50 (t, J=6.5 Hz, 2H), 3.04 (t, J=6.4 Hz, 5H), 2.64-2.54 (m, 5H), 2.42 (d, J=0.9 Hz, 3H), 1.69-1.59 (m, 2H), 1.54 (d, J=11.4 Hz, 2H).

### Example 27

### Synthesis of Compound 186

### Synthesis of Intermediate B58

[chemical structure]

[0640] 6-chloro-2,8-dimethylimidazo[1,2-b]pyridazine (400 mg, 2.20 mmol), B₂PIN₂ (839.1 mg, 3.30 mmol), KOAc (648.4 mg, 6.60 mmol), X-Phos (314.9 mg, 0.66 mmol), Pd₂(dba)₃ (341.9 mg, 0.33 mmol), and dioxane (15 mL) were combined in a sealed tube under a nitrogen atmosphere. The reaction mixture was irradiated with microwave radiation for 1 h at 110° C. The resulting mixture was filtered, and the filtrate concentrated in vacuo to afford product. LCMS (ES, m/z): 192 [M+H]⁺.

### Synthesis of Intermediate B59

[chemical structure]

[0642] A mixture of 6-bromo-2H-phthalazin-1-one (350.0 mg, 1.55 mmol), 2,8-dimethylimidazo[1,2-b]pyridazin-6-ylboronic acid (534.7 mg, 2.80 mmol), K₃PO₄ (990.4 mg, 4.66 mmol), and Pd(dppf)Cl₂ CH₂Cl₂ (126.70 mg, 0.15 mmol) in dioxane (15.00 mL) and H₂O (3.00 mL) was stirred for 12 h at 90° C. under a N2 atmosphere, then diluted with H₂O (50 mL) and extracted with DCM (3×50 mL). The combined organic layers were washed with saturated NaCl (1×50 mL), dried over anhydrous Na₂SO₄, and filtered. The filtrate was concentrated in vacuo to give a residue. The residue was purified by silica gel column chromatography, eluted with DCM/MeOH (92/8) to afford 6-[2,8-dimethylimidazo[1,2-b]pyridazin-6-yl]-2H-phthalazin-1-one (330 mg, 58.2%) as a solid. LCMS (ES, m/z): 292 [M+H]⁺.

### Synthesis of Intermediate B60

[chemical structure]

[0644] A mixture of 6-[2,8-dimethylimidazo[1,2-b]pyridazin-6-yl]-2H-phthalazin-1-one (300 mg, 1.03 mmol), tert-butyl 4-(methanesulfonyloxy)piperidine-1-carboxylate (316.4 mg, 1.13 mmol) and K₂CO₃ (284.6 mg, 2.06 mmol) in DMF (6 mL) was stirred for 12 h at 100° C., then diluted with H₂O (20 mL) and extracted with ethyl acetate (3×20 mL). The combined organic layers were washed with brine (30 mL), dried over anhydrous Na₂SO₄, and filtered. The filtrate was concentrated in vacuo to give a residue. The residue was purified by silica gel column chromatography, eluted with PE/EtOAc (9/1) to afford tert-butyl 4-(6-[2,8-dimethylimidazo[1,2-b]pyridazin-6-yl]-1-oxophthalazin-2-yl)piperidine-1-carboxylate (40 mg, 8.1%) as a solid. LCMS (ES, m/z): 475 [M+H]⁺.

### Synthesis of Compound 186

[chemical structure]

[0646] A mixture of tert-butyl 4-(6-[2,8-dimethylimidazo[1,2-b]pyridazin-6-yl]-1-oxophthalazin-2-yl)piperidine-1-carboxylate (36.0 mg, 0.07 mmol) and TFA (0.40 mL) in DCM (1.60 mL) was stirred for 1 h at room temperature. The resulting mixture was concentrated in vacuo to give a residue. The residue was purified by Prep-HPLC (Condition 1, Gradient 1) to afford 6-[2,8-dimethylimidazo[1,2-b]pyridazin-6-yl]-2-(piperidin-4-yl)phthalazin-1-one (4.8 mg, 16.6%) as a white solid. LCMS (ES, m/z): 375 [M+H]⁺. ¹H NMR (400 MHz, DMSO-d₆) δ 8.65-8.58 (m, 2H), 8.51 (dd, J=8.4, 1.8 Hz, 1H), 8.41 (d, J=8.5 Hz, 1H), 8.14 (d, J=1.0 Hz, 1H), 7.81 (d, J=1.2 Hz, 1H), 5.03-4.92 (m, 1H), 3.08 (d, J=12.3 Hz, 2H), 2.69-2.58 (m, 5H), 2.44 (d, J=0.8 Hz, 3H), 2.09 (s, 1H), 1.87 (qd, J=12.1, 4.1 Hz, 2H), 1.71 (d, J=11.3 Hz, 2H).

### Example 28

### Synthesis of Compound 191

### Synthesis of Intermediate B61

[chemical structure]

[0648] To a solution of 6-bromo-2-(methylthio)quinazolin-4(3H)-one (200 mg, 0.74 mmol) in NMP (1 mL) was added tert-butyl 4,7-diazaspiro[2.5]octane-4-carboxylate (188 mg, 0.89 mmol) followed by Et₃N (0.206 mL, 1.48 mmol). The reaction mixture was heated at 120° C. for 5 days, then cooled in ice, and water (4 mL) was added dropwise. The resulting suspension was stirred for 1 h, the solid collected by filtration, rinsed with water, and dried. The collected material was purified by silica gel column chromatography using a gradient of 0 to 50% of ethyl acetate in hexanes to provide tert-butyl 7-(6-bromo-4-oxo-3,4-dihydroquinazolin-2-yl)-4,7-diazaspiro[2.5]octane-4-carboxylate (181 mg, 56%). LCMS (ES, m/z): 434.9, 436.9 [M+H]⁺. ¹H NMR (DMSO-d₆, 400 MHz): δ_{H} 11.46 (1H, s), 7.95 (1H, s), 7.70 (1H, d, J=8.8 Hz), 7.21 (1H, d, J=8.5 Hz), 3.62 (2H, s), 3.50 (2H, s), 3.47 (2H, s), 1.41 (9H, s), 0.90 (2H, s), 0.84 (2H, s).

### Synthesis of Intermediate B62

[chemical structure]

[0650] Argon was bubbled into a mixture of tert-butyl 7-(6-bromo-4-oxo-3,4-dihydroquinazolin-2-yl)-4,7-diazaspiro[2.5]octane-4-carboxylate (86 mg, 0.20 mmol), 8-fluoro-2-methyl-6-(4,4,5,5-tetramethyl-1,3,2-dioxaborolan-2-yl)imidazo[1,2-a]pyridine (74 mg, 0.27 mmol) and dioxane (2.3 mL). Water (0.1 mL) was added, followed by Cs₂CO₃ (161 mg, 0.49 mmol) and Pd(dppf)Cl2CH₂Cl₂ (16 mg, 0.020 mmol). The reaction mixture was purged with argon for 10 min and heated at 95° C. for 16 h, then allowed to cool to room temperature. DMF was added to the cooled reaction mixture, followed by dropwise addition of 1 N HCl to pH 7. The reaction mixture was filtered through Celite, rinsed with DMF and the filtrate was concentrated in vacuo to give a residue. The residue was purified by silica gel column chromatography using a gradient of 0 to 20% of MeOH in CH₂Cl₂ to provide tert-butyl 7-(6-(8-fluoro-2-methylimidazo[1,2-a ]pyridin-6-yl)-4-oxo-3,4-dihydroquinazolin-2-yl)-4,7-diazaspiro[2.5]octane-4-carboxylate (53 mg, 53%). LCMS (ES, m/z): 505.3 [M+H]³⁰ . ¹ H NMR (DMSO-d₆, 400 MHz): δ_{H} 11.43 (1H, s), 8.84 (1H, s), 8.20 (1H, s), 7.95 (1H, d, J=8.6 Hz), 7.80 (1H, s), 7.54 (1H, d, J=12.6 Hz), 7.37 (1H, s), 3.65 (2H, s), 3.51 (4H, s), 2.36 (3H, s), 1.42 (9H, s), 0.92 (2H, s), 0.87 (2H, s).

### Synthesis of Compound 191

[chemical structure]

[0652] To tert-butyl 7-(6-(8-fluoro-2-methylimidazo[1,2-a]pyridin-6-yl)-4-oxo-3,4-dihydroquinazolin-2-yl)-4,7-diazaspiro[2.5]octane-4-carboxylate (38 mg, 0.075 mmol) was added 4 N HCl in dioxane (2 mL). The reaction mixture was stirred for 2 h, then concentrated in vacuo to give a residue. The residue was taken up in water, filtered through a 45 μM syringe filter, and the pH adjusted to 6-7 with 2 N Na₂CO₃. A precipitate formed and was collected by filtration, rinsed with water, and dried to afford 6-(8-fluoro-2-methylimidazo[1,2-a]pyridin-6-yl)-2-(4,7-diazaspiro[2.5]octan-7-yl)quinazolin-4(3H)-one (18 mg, 67%). LCMS (ES, m/z): 405.1 [M+H]⁺. ¹H NMR (DMSO-d₆, 400 MHz): δ_{H} 8.83 (1H, s), 8.19 (1H, s), 7.92 (1H, d, J=8.6 Hz), 7.80 (1H, s), 7.53 (1H, d, J=12.6 Hz), 7.33 (1H, d, J=8.3 Hz), 3.61 (2H, s), 3.49 (2H, s), 2.81 (2H, s), 2.36 (3H, s), 0.54 (2H, s), 0.46 (2H, s).

### Example 29

### Synthesis of Compound 190

### Synthesis of Intermediate

[chemical structure]

[0654] Argon was bubbled into a mixture of tert-butyl 7-(6-bromo-4-oxo-3,4-dihydroquinazolin-2-yl)-4,7-diazaspiro[2.5]octane-4-carboxylate (90 mg, 0.20 mmol), 2,8-dimethyl-6-(4,4,5,5-tetramethyl-1,3,2-dioxaborolan-2-yl)imidazo[1,2-b]pyridazine (79 mg, 0.29 mmol) and dioxane (2.2 mL). Water (0.1 mL) was added, followed by Cs₂CO₃ (168 mg, 0.52 mmol) and Pd(dppf)Cl₂.CH₂Cl₂ (16.9 mg, 0.021 mmol). The reaction mixture was purged with argon for 10 min and heated at 95° C. for 16 h, then allowed to cool to room temperature. DMF was added to the cooled reaction, followed by dropwise addition of 1 N HCl to pH 6-7. The reaction mixture was filtered through Celite, rinsed with DMF and the filtrate concentrated in vacuo to give a residue. The residue was purified by silica gel column chromatography using a gradient of 10 to 30% of MeOH in CH₂Cl₂ to afford tert-butyl 7-(6-(2,8-dimethylimidazo[1,2-b]pyridazin-6-yl)-4-oxo-3,4-dihydroquinazolin-2-yl)-4,7-diazaspiro[2.5]octane-4-carboxylate (43 mg, 41%). LCMS (ES, m/z): 502.0 [M+H]⁺. ¹H NMR (CHCl₃-d, 400 MHz): δ_{H} 10.57 (1H, s), 8.58 (1H, s), 8.31 (1H, dd, J=8.7, 2.2 Hz), 7.76 (1H, s), 7.50 (1H, d, J=8.7 Hz), 7.36 (1H, s), 3.76 (4H, d, J=13.5 Hz), 3.64 (2H, s), 2.72 (3H, s), 2.53 (3H, s), 1.50 (9H, s), 1.12 (4H, d, J=7.7 Hz).

### Synthesis of Compound 190

[chemical structure]

[0656] To tert-butyl 7-(6-(2,8-dimethylimidazo[1,2-b]pyridazin-6-yl)-4-oxo-3,4-dihydroquinazolin-2-yl)-4,7-diazaspiro[2.5]octane-4-carboxylate (43 mg, 0.086 mmol) was added 4 N HCl in dioxane (2 mL). The reaction mixture was stirred for 16 h, then concentrated in vacuo, taken up in water, and the pH adjusted to 6-7 with 1 N NaOH. A precipitate formed and was collected by filtration, rinsed with water, and dried. The solid was suspended in ethyl acetate (4 mL), stirred for 2 h then collected by filtration, rinsed with ethyl acetate and dried to afford 642,8-dimethylimidazo[1,2-b]pyridazin-6-yl)-2-(4,7-diazaspiro[2.5]octan-7-yl)quinazolin-4(3H)-one (19 mg, 55%). LCMS (ES, m/z): 402.1 [M+H]⁺. ¹H NMR (DMSO-d₆, 400 MHz): δ_{H} 8.54 (1H, s), 8.24 (1H, dd, J=8.7, 2.3 Hz), 8.02 (1H, s), 7.69 (1H, s), 7.35 (1H, d, J=8.6 Hz), 3.63 (2H, s), 3.51 (2H, s), 2.81 (2H, s), 2.58 (3H, s), 2.38 (3H, s), 0.54 (2H, s), 0.45 (2H, s).

### Example 30

### Synthesis of Compound 204

### Synthesis of Intermediate B75

[0657] tert-butyl 4-((3-(2-methyl-2H-indazol-6-yl)-4-oxo-3,4-dihydroquinazolin-7-yl)amino)piperidine-1-carboxylate was prepared using the procedure described for 152 (Example 3). 2-methyl-2H-indazol-5-amine was substituted for 2-methyl-2H-indazol-6-amine in the first step of Example 3, and the procedure described for the preparation of 152 (i.e. steps 2 and 3) were subsequently applied, with 1-methylpiperazine was substituted for tert-butyl 4-aminopiperidine-1-carboxylate in step 3. tert-butyl 4-((3-(2-methyl-2H-indazol-6-yl)-4-oxo-3,4-dihydroquinazolin-7-yl)amino)piperidine-1-carboxylate was obtained as a solid. LCMS (ES, m/z): 475.0 [M+H]⁺.

### Synthesis of Compound 204

[chemical structure]

[0659] To a solution of tert-butyl 4-((3-(2-methyl-2H-indazol-6-yl)-4-oxo-3,4-dihydroquinazolin-7-yl)amino)piperidine-1-carboxylate (109 mg, 0.23 mmol) in methanol (2.0 mL) was added 4 M HCl in dioxane (3 mL). The reaction mixture was stirred at room temperature for 1 h, then concentrated in vacuo to give a residue. The residue was purified by reverse phase chromatography using a gradient from 5 to 50% of acetonitrile in water containing 0.1% hydrochloric acid to afford 3-(2-methyl-2H-indazol-6-yl)-7-(piperidin-4-ylamino)quinazolin-4(3H)-one (22 mg, 26%) as a solid. LCMS (ES, m/z): 375.1 [M+H]⁺. ¹H NMR (CH₃OH-d₄, 400 MHz): δ_{H} 8.58 (1H, s), 8.34 (1H, s), 8.04 (1H, d, J=8.9 Hz), 7.88 (1H, d, J=8.8 Hz), 7.74 (1H, s), 7.14 (1H, dd, J=8.8, 1.8 Hz), 6.97-7.00 (1H, m), 6.79 (1H, d, J=2.2 Hz), 4.27 (3H, s), 3.84 (1H, m), 3.49 (2H, d, J=12.8 Hz), 3.23 (2H, t, J=12.6 Hz), 2.31 (2H, d, J=14.2 Hz), 1.77 (2H, q, J=11.9 Hz).

### Example 31

### Synthesis of Compound 203

### Synthesis of Compound 203

[chemical structure]

[0661] A mixture of 3-(2-methyl-2H-indazol-6-yl)-7-(piperidin-4-ylamino)quinazolin-4(3H)-one (45 mg, 0.12 mmol), and formaldehyde (37% in water, 20 mg, 0.049 mL, 0.60 mmol) in DCM (6 mL) and ethanol (2 mL) was stirred at room temperature for 1 h. NaBH(OAc)₃ (153 mg, 0.72 mmol) was added, and the reaction mixture was stirred at room temperature for and additional 1 h, diluted with DCM (50 mL), and washed with saturated NaHCO₃ (2×50 mL) and brine (50 mL). The organic layer was separated, dried over MgSO₄, filtered, and concentrated in vacuo to give a residue. The residue was purified by normal phase chromatography using a gradient of 10 to 50% (EtOAc/10% MeOH) and DCM with 1% Et3N additive to afford 3-(2-methyl-2H-indazol-6-yl)-7-((1-methylpiperidin-4-yl)amino)quinazolin-4(3H)-one (17 mg, 36%) as a solid. LCMS (ES, m/z): 389.2 [M+H]⁺. ¹H NMR (DMSO-d₆, 400 MHz): δ_{H} 8.43 (1H, s), 8.17 (1H, s), 7.81 (2H, dd, J=21.5, 8.8 Hz), 7.69 (1H, s), 7.05 (1H, d, J=8.8 Hz), 6.83 (1H, d, J=8.9 Hz), 6.61-6.63 (2H, m), 4.20 (3H, s), 2.75 (2H, d, J=10.9 Hz), 2.18 (3H, s), 2.06 (2H, t, J=11.3 Hz), 1.91 (2H, d, J=12.4 Hz), 1.40-1.49 (2H, m).

### Example 32

### Synthesis of Compound 192

### Synthesis of Intermediate B81

[chemical structure]

[0663] To a solution of 6-bromo-2-(methylthio)quinazolin-4(3H)-one (200 mg, 0.74 mmol), in NMP (1 mL) was added tert-butyl 4-aminopiperidine-1-carboxylate (354 mg, 1.78 mmol) followed by Et₃N (0.2 mL, 1.48 mmol). The reaction mixture was heated at 120° C. for 7 days, then allowed to cool to room temperature. Water was added to the reaction mixture, and a precipitate formed that was collected by filtration, rinsed with water, and dried. The solid was purified by silica gel column chromatography using a gradient from 0 to 10% of MeOH in CH₂Cl₂ to afford tert-butyl 4-((6-bromo-4-oxo-3,4-dihydroquinazolin-2-yl)amino)piperidine-1-carboxylate (193 mg, 62%). LCMS (ES, m/z): 423.1, 425.1 [M+H]⁺. ¹H NMR (DMSO-d₆, 400 MHz): δ_{H} 10.82 (1H, s), 7.92 (1H, s), 7.66 (1H, d,=8.8 Hz), 7.19 (1H, d,=8.7 Hz), 6.38 (1H, s), 3.96 (1H, m), 3.82 (2H, d, J=12.8 Hz), 2.94 (2H, br s), 1.89 (2H, d, J=11.9 Hz), 1.40 (9H, s), 1.31-1.37 (2H, m).

### Synthesis of Intermediate B82

[chemical structure]

[0665] Argon was bubbled into a mixture of tert-butyl 4-((6-bromo-4-oxo-3,4-dihydroquinazolin-2-yl)amino)piperidine-1-carboxylate (99 mg, 0.23 mmol), 2,8-dimethyl-6-(4,4,5,5-tetramethyl-1,3,2-dioxaborolan-2-yl)imidazo[1,2-b]pyridazine (89.4 mg, 0.33 mmol) and dioxane (2.3 mL). Water (0.12 mL) was added, followed by Cs₂CO₃ (191 mg, 0.59 mmol) and Pd(dppf)Cl₂.CH₂Cl₂ (19 mg, 0.023 mmol). The reaction mixture was purged with argon for 10 min and heated at 95° C. for 16 h. DMF was added to the cooled reaction followed by dropwise addition of 1 N HCl to pH 7. The reaction mixture was filtered through Celite, rinsed with DMF and the filtrate was concentrated in vacuo to a residue. The residue was purified by silica gel column chromatography using a gradient from 0 to 20% of MeOH in CH₂Cl₂ to afford tert-butyl 4-((6-(2,8-dimethylimidazo[1,2-b]pyridazin-6-yl)-4-oxo-3,4-dihydroquinazolin-2-yl)amino)piperidine-1-carboxylate (28 mg, 25%). LCMS (ES, m/z): 490.3 [M+H]⁺. ¹H NMR (DMSO-d₆, 400 MHz): δ_{H} 10.79 (1H, s), 8.53 (1H, d, J=2.2 Hz), 8.24 (1H, dd, J=8.7, 2.2 Hz), 8.04 (1H, s), 7.67 (1H, s), 7.37 (1H, d, J=8.7 Hz), 6.49 (1H, s), 4.02 (1H, m), 3.85 (2H, d, J=13.0 Hz), 2.96 (3H, br s), 2.59 (3H, s), 2.39 (2H, s), 1.93 (2H, d, J=12.3 Hz), 1.40 (9H, s), 1.31-1.37 (2H, m).

### Synthesis of Compound 192

[chemical structure]

[0667] To tert-butyl 4-(2-(2,7-dimethyl-2H-indazol-5-yl)-4-oxo-3,4-dihydroquinazolin-7-yl)piperazine-1-carboxylate (28 mg, 0.57 mmol) was added 4 N HCl in dioxane (2 mL). The reaction mixture was stirred for 2 h and concentrated in vacuo to a residue. The residue was taken up in water (3 mL), filtered through a 45 μM syringe filter, and pH adjusted to approximately 7 with 2 N Na₂CO₃. A precipitate formed, collected by filtration, and dried to afford 6-(2,8-dimethylimidazo[1,2-b]pyridazin-6-yl)-2-(piperidin-4-ylamino)quinazolin-4(3H)-one (13 mg, 61%). LCMS (ES, m/z): 390.2 [M+H]⁺. ¹H NMR (DMSO-d₆, 400 MHz): δ_{H} 8.51 (1H, d, J=2.1 Hz), 8.21 (1H, dd, J=8.7, 2.2 Hz), 8.03 (1H, s), 7.66 (1H, s), 7.35 (1H, d, J=8.7 Hz), 6.63 (1H, br s), 3.89 (1H, m), 2.93 (2H, dt, J=12.3, 3.6 Hz), 2.58 (3H, s), 2.55 (2H, t, J=11.3 Hz), 2.38 (3H, s), 1.88 (2H, d, J=11.6 Hz) 1.28-1.36 (2H, m).

### Example 33

### Synthesis of Compound 193

### Synthesis of Intermediate B83

[chemical structure]

[0669] Argon was bubbled into a mixture of tert-butyl 4-((6-bromo-4-oxo-3,4-dihydroquinazolin-2-yl)amino)piperidine-1-carboxylate (90 mg, 0.21 mmol), 8-fluoro-2-methyl-6-(4,4,5,5-tetramethyl-1,3,2-dioxaborolan-2-yl)imidazo[1,2-a]pyridine (57.9 mg, 0.21 mmol) and dioxane (2.1 mL). Water (0.1 mL) was added, followed by Cs₂CO₃ (174 mg, 0.53 mmol) and Pd(dppf)Cl₂.CH₂Cl₂ (17.4 mg, 0.021 mmol). The reaction mixture was purged with argon for 10 min and heated at 95° C. for 16, then allowed to cool to room temperature. DMF was added to the reaction mixture followed by dropwise addition of 1 N HCl to pH 7. The reaction mixture was filtered through Celite, rinsed with DMF, and the filtrate was concentrated in vacuo to a residue. The residue was purified by silica gel column chromatography using a gradient from 80 to 100% of ethyl acetate in hexane to afford tert-butyl 4-((6-(8-fluoro-2-methylimidazo[1,2-a]pyridin-6-yl)-4-oxo-3,4-dihydroquinazolin-2-yl)amino)piperidine-1-carboxylate (62 mg, 59%). LCMS (ES, m/z): 493.0 [M+H]⁺. ¹H NMR (DMSO-d₆, 400 MHz): δ_{H} 10.75 (1H, s), 8.81 (1H, s), 8.16 (1H, d, J=2.3 Hz), 7.91 (1H, dd, J=8.5, 2.3 Hz), 7.81 (1H, d, J=2.9 Hz), 7.51 (1H, d, J=12.6 Hz), 7.35 (1H, d, J=8.6 Hz), 6.39 (1H, s), 4.00 (1H, br s), 3.84 (2H, d, J=13.3 Hz), 2.96 (2H, br s), 2.36 (3H, s), 1.93 (2H, d, J=12.3 Hz), 1.40 (9H, s), 1.31-1.36 (2H, m).

### Synthesis of Compound 193

[chemical structure]

[0671] To tert-butyl 4-((6-(8-fluoro-2-methylimidazo[1,2-a]pyridin-6-yl)-4-oxo-3,4-dihydroquinazolin-2-yl)amino)piperidine-1-carboxylate (62 mg, 0.13 mmol) was added 4 N HCl in dioxane (2 mL). The reaction mixture was stirred for 12 h, then concentrated in vacuo to a residue, the residue dissolved in water, and filtered through a 40 μm syringe filter. The filtered solution was neutralized to pH 6-7 with 1 N NaOH. A precipitate formed that was collected by filtration, rinsed with water, and allowed to dry. The solid was purified by a silica gel column chromatography using a gradient from 0 to 30% of MeOH in 2% Et₃N in CH₂Cl₂ to afford 6-(8-fluoro-2-methylimidazo[1,2-a]pyridin-6-yl)-2-(piperidin-4-ylamino)quinazolin-4(3H)-one (22 mg, 45%). LCMS (ES, m/z): 393.1 [M+H]⁺. ¹H NMR (DMSO-d₆, 400 MHz): δ_{H} 8.81 (1H, s), 8.17 (1H, s), 7.92 (1H, d, J=8.6 Hz), 7.80 (1H, s), 7.51 (1H, d, J=12.6 Hz), 7.33 (1H, d, J=8.6 Hz), 6.84 (1H, s), 4.07 (1H, br s), 3.23-3.25 (2H, m), 3.00 (2H, t, J=11.7 Hz), 2.35 (3H, s), 2.08 (2H, br s), 1.62 (2H, br s).

### Example 34

### Synthesis of Compound 205

### Synthesis of Compound 205

[chemical structure]

[0673] Tert-butyl 4-(7-bromo-2-(dimethylamino)-4-oxo-1,4-dihydroquinazolin-3(2H)-yl)piperidine-1-carboxylate (130 mg, 0.29 mmol), 8-fluoro-2-methyl-6-(4,4,5,5-tetramethyl-1,3,2-dioxaborolan-2-yl)imidazo[1,2-a]pyridine (95 mg, 0.34 mmol), PdCl₂(dppf) (21 mg, 0.029 mmol) and Cs₂CO₃ (467 mg, 1.43 mmol) were combined in dioxane (3.3 mL) and H₂O (340 μL) in a sealed tube and heated at 90° C. for 16 h, then at 120° C. for 48 hours. The reaction mixture was allowed to cool to room temperature and concentrated in vacuo to give a residue. The residue was purified by flash chromatography on a silica gel column using a gradient of 0-20% MeOH in DCM. Selected fractions were combined and concentrated in vacuo. To the resulting solid was added HCl 4 M in dioxane (2 mL), and the solution was stirred vigorously at room temperature for 6 hours, then concentrated in vacuo to give a residue. To the residue was added water (15 mL) and DCM (15 mL). The aqueous phase was washed with DCM (2×15 mL) and neutralized with (NH₄)₂CO₃ to form a suspension. The resulting suspension was cooled to 4° C., the precipitate collected by vacuum filtration, washed with cold water, and dried under high vacuum at room temperature overnight to afford 7-(8-fluoro-2-methylimidazo[1,2-a]pyridin-6-yl)-3-(piperidin yl)quinazolin-4(3H)-one (40 mg, 37%) as a solid. LCMS (ES, m/z): 378.2 [M+H]⁺. ¹H NMR (DMSO-d₆, 300 MHz): δ 9.02 (1H, s), 8.49 (1H, s), 8.23 (1H, d, J=8.5 Hz), 8.04 (1H, s), 7.92 (1H, d, J=9.0 Hz), 7.86 (1H, s), 7.70 (1H, d, J=12.7 Hz), 4.70 (1H, m), 3.09 (2H, d, J=12.7 Hz), 2.39 (3H, s), 1.79-1.96 (4H, m).

### Example 35

### Synthesis of Compound 182

### Synthesis of Intermediate B90

[chemical structure]

[0675] 7-bromoquinazolin-4(3H)-one (2.53 g, 11.2 mmol), tert-butyl 4-(tosyloxy)piperidine-1-carboxylate (12.0 g, 33.8 mmol), and K₂CO₃ (4.67 g, 33.8 mmol) were dissolved in DME (150 mL) and refluxed for 72 hours. The reaction mixture was filtered through a pad of Celite and the filter cake washed with ethyl acetate (100 mL). The filtrate was concentrated in vacuo to give a residue and the residue was purified by flash chromatography on an silica gel column using a gradient of 0-70% EtOAc in hexane to afford tert-butyl 4-(7-bromo-4-oxoquinazolin-3(4H)-yl)piperidine-1-carboxylate (2.16 g, 47%) as a solid. LCMS (ES, m/z): 408.1, 410.1 [M+H]⁺.

### Synthesis of Compound 182

[chemical structure]

[0677] Tert-butyl 4-(7-bromo-4-oxoquinazolin-3(4H)-yl)piperidine-1-carboxylate (100 mg, 0.25 mmol), 2-methyl-5-(4,4,5,5-tetramethyl-1,3,2-dioxaborolan-2-yl)-2H-indazole (76 mg, 0.29 mmol), PdCl₂(dppf) (18 mg, 0.024 mmol), and Cs₂CO₃ (239 mg, 0.74 mmol) was dissolved in dioxane (2.8 mL) and H₂O (280 μL) and heated at 90° C. for 4 h under argon atmosphere. The reaction mixture was diluted with ethyl acetate (25 mL) and washed with saturated NaHCO₃ (20 mL) and brine (2×20 mL). The organic phase was then filtered, dried over Na₂SO₄, and concentrated in vacuo to give a residue. The residue was purified by flash chromatography on a silica gel column using a gradient of 0-20% MeOH in DCM. Selected fractions were combined and evaporated in vacuo to afford a solid. To solid was added HCl 4 M in dioxane (5 mL), and the resulting mixture was stirred vigorously for 2 hours, then concentrated in vacuo and redissolved in water (10 mL). The aqueous layer was extracted with DCM (2×10 mL) and neutralized with (NH₄)₂CO₃to form a suspension. The resulting suspension was cooled to 4° C. for 4 hours, and the precipitate collected by vacuum filtration, washed with cold water, and dried under high vacuum overnight to afford 7-(2-methyl-2H-indazol-5-yl)-3-(piperidin-4-yl)quinazolin-4(3H)-one (57 mg, 65%) as a solid. LCMS (ES, m/z): 360.2 [M+H]⁺. ¹H NMR (DMSO-d₆, 300 MHz): δ 8.46 (2H, m), 8.18-8.23 (2H, m), 7.94 (2H, m), 7.72 (2H, m), 4.71 (1H, m), 4.21 (3H, s), 3.10 (2H, m), 2.61 (2H, m), 1.92 (2H, m), 1.79 (2H, m).

### Example 36

### Synthesis of Compound 206

### Synthesis of Compound 206

[chemical structure]

[0679] Tert-butyl 4-(7-bromo-4-oxoquinazolin-3(4H)-yl)piperidine-1-carboxylate (100 mg, 0.25 mmol), 7-fluoro-2-methyl-5-(4,4,5,5-tetramethyl-1,3,2-dioxaborolan-2-yl)-2H-indazole (81 mg, 0.29 mmol), PdCl₂(dppf) (18 mg, 0.024 mmol), and Cs₂CO₃ (239 mg, 0.74 mmol) were dissolved in dioxane (2.8 mL) and H₂O (280 μL) and heated at 90° C. for 4 h under argon atmosphere in a sealed tube. The reaction mixture was diluted with ethyl acetate (25 mL) and washed with saturated NaHCO₃ (20 mL) and brine (2×20 mL). The organic phase was filtered, dried over Na₂SO₄, and concentrated in vacuo to give a residue. The residue was purified by flash chromatography on a silica gel column using a gradient of 0-20% MeOH in DCM. Selected fractions were combined and concentrated in vacuo to yield a solid. To the solid was added HCl 4 M in dioxane (5 mL) and the resulting mixture was stirred vigorously for 2 h. The reaction mixture was concentrated in vacuo to give a residue and the residue was dissolved with water (10 mL). This aqueous solution was extracted with DCM (2×10 mL) and neutralized with (NH₄)₂CO₃ to form a suspension. The resulting suspension was cooled to 4° C. for 4 hours and the resulting precipitate collected by vacuum filtration, washed with cold water, and dried under high vacuum overnight to afford 7-(7-fluoro-2-methyl-2H-indazol-5-yl)-3-(piperidin yl)quinazolin-4(3H)-one (75 mg, 81%) as a solid. LCMS (ES, m/z): 378.2 [M+H]⁺. ¹H NMR (DMSO-d₆, 300 MHz): δ 8.59 (1H, d, J=3.0 Hz), 8.47 (1H, s), 8.21 (1H, d, J=8.4 Hz), 8.06 (1H, s), 7.99 (1H, s), 7.93 (1H, d, J=8.4 Hz), 7.57 (1H, d, J=13.0 Hz), 4.70 (1H, m), 4.24 (3H, s), 3.10 (2H, m), 2.59 (2H, m), 1.92 (2H, m), 1.79 (2H, m).

### Example 37

### Synthesis of Compound 207

[chemical structure]

[0681] 7-(8-fluoro-2-methylimidazo[1,2-a]pyridin-6-yl)-3-(piperidin-4-yl)quinazolin-4(3H)-one (18 mg, 0.048 mmol) was dissolved in a mixture of DCM (500 μL) and EtOH (150 μL). To this solution was added formaldehyde (37% in water, 20 mg, 0.24 mmol). The reaction mixture was stirred at room temperature for 1 h, then NaBH(OAc)3 (61 mg, 0.29 mmol) was added, and the reaction mixture was stirred for an additional 2 h at room temperature. The reaction mixture was diluted with ethyl acetate (20 mL) and washed with saturated NaHCO₃ (2×15 mL) and brine (2×15 mL). The organic layer was dried over Na₂SO₄ and the solvent was removed in vacuo to give a residue. The residue was purified by flash chromatography on a silica gel column using a gradient of 5-30% MeOH in DCM to afford 7-(8-fluoro-2-methylimidazo[1,2-a]pyridin-6-yl)-3-(1-methylpiperidin-4-yl)quinazolin-4(3H)-one (12 mg, 64%) as a solid. LCMS (ES, m/z): 392.2 [M+H]⁺. ¹H NMR (DMSO-d₆, 300 MHz): δ 9.01 (1H, s), 8.52 (1H, s), 8.23 (1H, d, J=8.4 Hz), 8.04 (1H, s), 7.92 (1H, d, J=8.7 Hz), 7.86 (1H, s), 7.70 (1H, d, J=12.6 Hz), 4.60 (1H, m), 2.95 (2H, m), 2.39 (3H, s), 2.24 (3H, s), 2.11 (4H, m), 1.82 (2H, m).

### Example 38

### Synthesis of Compound 208

### Synthesis of Compound 208

[chemical structure]

[0683] To 7-(2-methyl-2H-indazol-5-yl)-3-(piperidin-4-yl)quinazolin-4(3H)-one (20 mg, 0.056 mmol) in a mixture of DCM (520 μL) and EtOH (170 μL) was added formaldehyde (37% in water, 23 mg, 0.28 mmol). The reaction mixture was stirred at room temperature for 1 h, then NaBH(OAc)₃ (71 mg, 0.33 mmol) was added, and the reaction mixture was stirred for an additional 2 h at room temperature. The reaction mixture was diluted with ethyl acetate (20 mL) and washed with saturated NaHCO₃ (2×15 mL) and brine (2×15 mL). The organic layer was dried over Na₂SO₄, filtered, and concentrated in vacuo to give a residue. The residue was purified by flash chromatography on a silica gel column using a gradient of 5-30% MeOH in DCM to afford 7-(2-methyl-2H-indazol-5-yl)-3-(1-methylpiperidin-4-yl)quinazolin-4(3H)-one (17 mg, 81%) as a solid. LCMS (ES, m/z): 374.2 [M+H]⁺. ¹H NMR (DMSO-d₆, 300 MHz): δ 8.48 (2H, d, J=10.8 Hz), 8.18-8.22 (2H, m), 7.92 (2H, d, J=11.7 Hz), 7.71 (2H, s), 4.61 (1H, m), 4.21 (3H, s), 2.95 (2H, m), 2.25 (3H, s), 2.11 (4H, m), 1.82 (2H, m).

### Example 39

### Synthesis of Compound 209

### Synthesis of Compound 209

[chemical structure]

[0685] To 7-(7-fluoro-2-methyl-2H-indazol-5-yl)-3-(piperidin-4-yl)quinazolin-4(3H)-one (25 mg, 0.066 mmol) in a mixture of DCM (620 μL) and EtOH (210 μL) was added formaldehyde (37% in water, 27 mg, 0.33 mmol). The reaction mixture was stirred at room temperature for 1 h, then NaBH(OAc)₃ (84 mg, 0.40 mmol) was added, and the reaction mixture was stirred for an additional 2 h at room temperature. The reaction mixture was diluted with ethyl acetate (20 mL) and washed with saturated NaHCO₃ (2×15 mL) and brine (2×15 mL). The organic layer was dried over Na₂SO₄, filtered, and concentrated in vacuo to give a residue. The residue was purified by flash chromatography on a silica gel column using a gradient of 5-30% MeOH in DCM to afford 7-(7-fluoro-2-methyl-2H-indazol-5-yl)-3-(1-methylpiperidin-4-yl)quinazolin-4(3H)-one (21 mg, 80%) as a solid. LCMS (ES, m/z): 392.2 [M+H]⁺. ¹H NMR (DMSO-d₆, 300 MHz): δ 8.59 (1H, s), 8.50 (1H, s), 8.21 (1H, d, J=8.3 Hz), 8.06 (1H, s), 7.98 (1H, s), 7.93 (1H, d, J=8.7 Hz), 7.56 (1H, d, J=13.3 Hz), 4.61 (1H, m), 4.24 (3H, s), 2.95 (2H, m), 2.24 (3H, s), 2.10 (4H, m), 1.82 (2H, m).

### Example 40

### Synthesis of Compound 210

### Synthesis of Intermediate B91

[chemical structure]

[0687] To a solution of 2-amino-5-bromo-3-fluorobenzoic acid (1.00 g, 4.27 mmol) and tert-butyl 4-aminopiperidine-1-carboxylate (899 mg, 4.49 mmol) in DMF (20 mL) were added DIPEA (2.23 mL, 12.8 mmol) and HATU (1.95 g, 5.13 mmol) sequentially. The reaction mixture was stirred at 0° C. for 1 h, then partitioned between ethyl acetate (100 mL) and aqueous NH₄Cl saturated (100 ml). The organic layer was separated, washed with aqueous NH₄Cl (sat) (50 ml), aqueous NaHCO₃ (sat) (50 ml), and brine (50 mL), dried over MgSO₄, filtered, and concentrated in vacuo to afford tert-butyl 4-(2-amino-4-bromo-3-fluorobenzamido)piperidine-1-carboxylate (1.76 g, 99%) as a solid. LCMS (ES, m/z): 438.1, 440.1 [M+Na]⁺.

### Synthesis of Intermediate B92

[chemical structure]

[0689] To a solution of tert-butyl 4-(2-amino-4-bromo-3-fluorobenzamido)piperidine-1-carboxylate (1.70 g, 4.1 mmol) in THF (40 mL) was added triethylorthofomate (6.05 g, 40.8 mmol) and pTSA (0.08g, 0.41 mmol). The reaction mixture was stirred at room temperature for 18 h, then diluted with ethyl acetate (200 mL), washed with NaHCO₃ (sat) (2×50 ml) and brine (50 mL), dried over MgSO₄, filtered, and concentrated in vacuo to afford tert-butyl 4-(7-bromo-8-fluoro-4-oxoquinazolin-3(4H)-yl)piperidine-1-carboxylate (1.7 g, 98%) as a solid. LCMS (ES, m/z): 426.1, 428.1 [M+H]⁺.

### Synthesis of Intermediate B93

[chemical structure]

[0691] A mixture of tert-butyl 4-(7-bromo-8-fluoro-4-oxoquinazolin-3(4H)-yl)piperidine-1-carboxylate (154 mg, 0.36 mmol), 8-fluoro-2-methyl-6-(4,4,5,5-tetramethyl-1,3,2-dioxaborolan-2-yl)imidazo[1,2-a]pyridine (100 mg, 0.36 mmol), Pd(dppf)Cl₂ (26 mg, 0.036 mmol) and K₂CO₃ (150 mg, 1.08 mmol) in a mixture of dioxane (4.0 mL) and H₂O (1.0 mL) was heated to 80° C. for 2 h and then cooled to room temperature. The reaction mixture was diluted with ethyl acetate (50 mL), and washed with water (25 mL) and brine (25 mL). The organic layer was separated, dried over MgSO₄, filtered, and concentrated in vacuo to give a residue and the residue was purified by normal phase flash chromatography using 0-10% MeOH/DCM gradient to afford tert-butyl 4-(8-fluoro-7-(8-fluoro-2-methylimidazo[1,2-a]pyridin-6-yl)-4-oxoquinazolin-3 (4H)-yl)piperidine-1-carboxylate (176 mg, 98%) as a solid. LCMS (ES, m/z): 495.8 [M+H]⁺.

### Synthesis of Compound 210

[chemical structure]

[0693] To a solution of tert-butyl 4-(8-fluoro-7-(8-fluoro-2-methylimidazo[1,2-a]pyridin-6-yl)-4-oxoquinazolin-3(4H)-yl)piperidine-1-carboxylate 6 (172 mg, 0.35 mmol) in methanol (4.0 mL) was added 4 M HCl in dioxane (6.0 mL). The reaction mixture was stirred at room temperature for 1 h, then concentrated in vacuo to give a residue. The residue was purified by reverse phase chromatography using a gradient from 5 to 50% of acetonitrile in water containing 0.1% formic acid to afford a solid that was dissolved in water (2 mL), neutralized with 10% ammonium hydroxide (2 ml) and lyophilized to afford 8-fluoro-7-(8-fluoro-2-methylimidazo[1,2-a]pyridin-6-yl)-3-(piperidin-4-yl)quinazolin-4(3H)-one (101 mg, 74%). LCMS (ES, m/z): 395.8 [M+H]⁺. ¹H NMR (CH₂Cl₂-d₂, 400 MHz): δ_{H} 8.27 (2H, d, J=8.0 Hz), 8.14 (1H, d, J=8.4 Hz), 7.54-7.58 (2H, m), 7.17 (1H, d, J=11.6 Hz), 4.90 (1H, t, J=12.3 Hz), 3.24-3.29 (2H, m), 2.80-2.86 (2H, m), 2.49 (3H, s), 1.88-2.02 (4H, m).

### Example 41

### Synthesis of Compound 227

### Synthesis of Compound 227

[chemical structure]

[0695] A mixture of 8-fluoro-7-(8-fluoro-2-methylimidazo[1,2-a]pyridin-6-yl)-3-(piperidin-4-yl)quinazolin-4(3H)-one (60 mg, 0.15 mmol) and formaldehyde (37% in water, 23 mg, 0.061 mL, 0.76 mmol) in DCM (6 mL) and ethanol (2 mL) was stirred at room temperature for 1 h. NaBH(OAc)₃ (193 mg, 0.91 mmol) was added and the reaction mixture was stirred at room temperature for an additional 1 h. The reaction mixture was diluted with DCM (50 mL) and washed with saturated NaHCO₃ (2×50 mL) and brine (50 mL). The organic layer was separated, dried over MgSO₄, filtered, and concentrated in vacuo to give a residue. The residue was purified by normal phase chromatography using a gradient from 10 to 50% (10% MeOH in EtOAc)/DCM with 1% Et3N additive to afford 8-fluoro-7-(8-fluoro-2-methylimidazo[1,2-a ]pyridin-6-yl)-3-(1-methylpiperidin-4-yl)quinazolin-4(3H)-one (25 mg, 40%) as a solid. LCMS (ES, m/z): 409.8 [M+H]⁺. ¹H NMR (CHCl₃-d, 400 MHz): δ_{H} 8.24 (2H, d, J=6.8 Hz), 8.17 (1H, d,=8.5 Hz), 7.56 (1H, t,=7.5 Hz), 7.50 (1H, s), 7.14 (1H, d,=11.1 Hz), 4.88 (1H, br s), 3.05 (2H, d, J=11.4 Hz), 2.52 (3H, s), 2.37 (3H, s), 2.23 (2H, s), 2.01 (4H, s).

### Example 42

### Synthesis of Compound 228

### Synthesis of Intermediate B94

[0696] Tert-butyl 4-(3-(8-fluoro-2-methylimidazo[1,2-a]pyridin-6-yl)-4-oxo-3,4-dihydroquinazolin-7-yl)piperazine-1-carboxylate was prepared using the procedure described in Example 3, where 2-methyl-2H-indazol-5-amine was substituted for 8-fluoro-2-methylimidazo[1,2-a]pyridin-6-amine in step 1, and steps 2 and 3 of Example 3 were subsequently applied, substituting 1-methylpiperazine for tert-butyl piperazine-1-carboxylate in step 3. Tert-butyl 4-(3-(8-fluoro methylimidazo[1,2-a]pyridin-6-yl)-4-oxo-3,4-dihydroquinazolin-7-yl)piperazine-1-carboxylate was obtained as a solid. LCMS (ES, m/z): 479.2 [M+H]⁺.

### Synthesis of Compound 228

[chemical structure]

[0698] To a solution of tert-butyl 4-(3-(8-fluoro-2-methylimidazo[1,2-a]pyridin-6-yl)-4-oxo-3,4-dihydroquinazolin-7-yl)piperazine-1-carboxylate (50 mg, 0.10 mmol) in methanol (2.0 mL) was added 4 M HCl in dioxane (2.0 mL). The reaction mixture was stirred at room temperature for 1 h, then concentrated in vacuo to give a residue. The residue was purified by reverse phase chromatography using a gradient from 5 to 50% of acetonitrile in water containing 0.1% formic acid to afford a white solid that was dissolved in water (2 mL), neutralized with 10% ammonium hydroxide (1 ml), and lyophilized to afford 3-(8-fluoro-2-methylimidazo[1,2-a]pyridin-6-yl)-7-(piperazin-1-yl)quinazolin-4(3H)-one (27 mg, 68%). LCMS (ES, m/z): 378.8 [M+H]⁺. ¹H NMR (CH₃OH-d₄, 400 MHz)*: δ_{H} 8.51 (1H, s), 8.23 (1H, s), 8.12 (1H, d, J=9.0 Hz), 7.76 (1H, s), 7.19-7.26 (2H, m), 7.06 (1H, s), 3.52 (4H, m), 3.12 (4H, m), 2.46 (3H, s).

### Example 43

### Synthesis of Compound 229

### Synthesis of Compound 229

[chemical structure]

[0700] A mixture of 3-(8-fluoro-2-methylimidazo[1,2-c]pyridin-6-yl)-7-(piperazin-1-yl)quinazolin-4(3H)-one (22 mg, 0.06 mmol) and formaldehyde (37% in water, 9 mg, 0.024 mL, 0.29 mmol) in DCM (6 mL) and ethanol (2 mL) was stirred at room temperature for 1 h. NaBH(OAc)₃ (74 mg, 0.35 mmol) was added, and the reaction mixture was stirred at room temperature for an additional 1 h. The reaction mixture was diluted with DCM (50 mL) and washed with saturated NaHCO₃ (2×50 mL) and brine (50 mL). The organic layer was separated, dried over MgSO₄, filtered, and concentrated in vacuo to give a residue. The residue was purified by normal phase chromatography using a gradient from 10 to 50% (EtOAc/10% MeOH)/DCM with 1% Et₃N additive to afford 3-(8-fluoro-2-methylimidazo[1,2-a]pyridin-6-yl)-7-(4-methylpiperazin-1-yl)quinazolin-4(3H)-one (5.5 mg, 24%) as a solid. LCMS (ES, m/z): 392.9 [M+H]⁺. ¹H NMR (CH₂Cl₂-d₂, 400 MHz): δ_{H} 8.12 (2H, d+S, J=9.8 Hz), 8.01 (1H, s), 7.55 (1H, s), 7.13 (1H, d, J=9.1 Hz), 7.04 (1H, s), 6.97 (1H, d, J=10.7 Hz), 3.46 (4H, bs), 2.56 (4H, bs), 2.49 (3H, s), 2.34 (3H, s).

### Example 44

### Synthesis of Compound 230

### Synthesis of Intermediate B95

[0701] Tert-butyl 4-(5-fluoro-7-(8-fluoro-2-methylimidazo[1,2-c]pyridin-6-yl)-4-oxoquinazolin-3 (4H)-yl)piperidine-1-carboxylate was prepared according to the procedure described in Example 61, substituting 2-amino-5-bromo-6-fluorobenzoic acid for 2-amino-5-bromo-3-fluorobenzoic acid in step 1, and subsequently applying steps 2 and step 3 of Example 61. Tert-butyl 4-(5-fluoro-7-(8-fluoro-2-methylimidazo[1,2-c]pyridin-6-yl)-4-oxoquinazolin-3(4H)-yl)piperidine-1-carboxylate was obtained as a solid. LCMS (ES, m/z): 495.8 [M+H]⁺.

### Synthesis of Compound 230

[chemical structure]

[0703] To a solution of tert-butyl 4-(5-fluoro-7-(8-fluoro-2-methylimidazo[1,2-a]pyridin-6-yl)-4-oxoquinazolin-3(4H)-yl)piperidine-1-carboxylate (75 mg, 0.15 mmol) in methanol (2.0 mL) was added 4 M HCl in dioxane (2.0 mL). The reaction mixture was stirred at room temperature for 1 h, then concentrated in vacuo to give a residue. The residue was purified by reverse phase chromatography using a gradient from 5 to 50% of acetonitrile in water containing 0.1% formic acid to give a solid that was dissolved in water (2 mL), neutralized with 10% ammonium hydroxide (1 ml), and lyophilized to afford 5-fluoro-7-(8-fluoro-2-methylimidazo[1,2-a]pyridin-6-yl)-3-(piperidin-4-yl)quinazolin-4(3H)-one (45 mg, 75%). LCMS (ES, m/z): 395.8 [M+H]⁺. ¹H NMR (CH₂Cl₂-d₂, 400 MHz)*: δ_{H} 8.41 (1H, s), 8.34 (1H, s), 7.74 (1H, s), 7.61 (1H, s), 7.42 (1H, d, J=11.7 Hz), 7.30 (1H, d, J=11.4 Hz), 4.98 (1H, m), 3.62 (2H, d, J=13.1 Hz), 3.15 (2H, t, J=13.0 Hz), 2.51-2.61 (2H, m), 2.47 (3H, s), 2.16 (2H, d, J=13.5 Hz).

### Example 45

### Synthesis of Compound 231

### Synthesis of Compound 231

[chemical structure]

[0705] A mixture of 5-fluoro-7-(8-fluoro-2-methylimidazo[1,2-a]pyridin-6-yl)-3-(piperidin-4-yl)quinazolin-4(3H)-one (40 mg, 0.10 mmol), and formaldehyde (37% in water, 15 mg, 0.041 mL, 0.51 mmol) in DCM (6 mL) and ethanol (2 mL), was stirred at room temperature for 1 h. NaBH(OAc)₃ (129 mg, 0.61 mmol) was added, and the reaction mixture was stirred at room temperature for an additional 1 h. The reaction mixture was diluted with DCM (50 mL) and washed with saturated NaHCO₃ (2×50 mL) and brine (50 mL). The organic layer was separated, dried over MgSO₄, filtered, and concentrated in vacuo to give a residue. The residue was purified by normal phase chromatography using a gradient from 10 to 50% (10% MeOH in EtOAc)/DCM with 1% Et3N additive to afford 5-fluoro-7-(8-fluoro-2-methylimidazo[1,2-a ]pyridin-6-yl)-3-(1-methylpiperidin-4-yl)quinazolin-4(3H)-one (17 mg, 41%) as a solid. LCMS (ES, m/z): 409.8 [M+H]⁺. ¹H NMR (CH₂Cl₂-d₂, 400 MHz): δ_{H} 8.27 (1H, s), 8.18 (1H, s), 7.68 (1H, s), 7.55 (1H, d, J=2.9 Hz), 7.31-7.34 (1H, m), 7.20 (1H, d, J=11.5 Hz), 4.76-4.83 (1H, m), 3.01 (2H, d, J=11.5 Hz), 2.48 (3H, s), 2.32 (3H, s), 2.20 (2H, t, J=11.4 Hz), 1.96-2.05 (4H, m).

### Example 46

### Synthesis of Compound 232

### Synthesis of Intermediate B96

[0706] Tert-butyl 4-(7-(2,7-dimethyl-2H-indazol-5-yl)-5-fluoro-4-oxoquinazolin-3(4H)-yl)piperidine-1-carboxylate was prepared according to the procedure described in Example 61, substituting 2-amino-5-bromo-6-fluorobenzoic acid for 2-amino-5-bromo-3-fluorobenzoic acid in step 1, and subsequently applying steps 2 and step 3 of Example 61, substituting 2,7-dimethyl-5-(4,4,5,5-tetramethyl-1,3,2-dioxaborolan-2-yl)-2H-indazole for 8-fluoro-2-methyl-6-(4,4,5,5-tetramethyl-1,3,2-dioxaborolan-2-yl)imidazo[1,2-a]pyridine as the starting material in step 3. Tert-butyl 4-(7-(2,7-dimethyl-2H-indazol-5-yl)-5-fluoro-4-oxoquinazolin-3 (4H)-yl)piperidine-1-carboxylate was obtained as a solid. LCMS (ES, m/z): 492.2 [M+H]⁺.

### Synthesis of Compound 232

[chemical structure]

[0708] To a solution of tert-butyl 4-(7-(2,7-dimethyl-2H-indazol-5-yl)-5-fluoro-4-oxoquinazolin-3 (4H)-yl)piperidine-1-carboxylate (70 mg, 0.14 mmol) in methanol (2.0 mL) was added 4 M HCl in dioxane (2.0 mL). The reaction mixture was stirred at room temperature for 1 h, then concentrated in vacuo to give a residue. The residue was purified by reverse phase chromatography using a gradient from 5 to 50% of acetonitrile in water containing 0.1% formic acid to afford a solid which was dissolved in water (2 mL), neutralized with 10% ammonium hydroxide (1 ml), and lyophilized to afford 7-(2,7-dimethyl-2H-indazol-5-yl)-5-fluoro-3-(piperidin-4-yl)quinazolin-4(3H)-one (42 mg, 75%). LCMS (ES, m/z): 391.8 [M+H]⁺. ¹H NMR (CHCl₃-d, 400 MHz): δ_{H} 8.15 (1H, s), 7.99 (1H, s), 7.79 (2H, d, J=14.1 Hz), 7.46 (1H, d, J=12.1 Hz), 7.38 (1H, s), 4.96-5.01 (1H, m), 4.27 (3H, s), 3.40 (2H, d, J=12.3 Hz), 2.88-2.95 (2H, m), 2.70 (3H, s), 1.97-2.08 (4H, m).

### Example 47

### Synthesis of Compound 233

### Synthesis of Compound 233

[chemical structure]

[0710] A mixture of 7-(2,7-dimethyl-2H-indazol-5-yl)-5-fluoro-3-(piperidin-4-yl)quinazolin-4(3H)-one (50 mg, 0.13 mmol) and formaldehyde (37% in water, 19 mg, 0.052 mL, 0.64 mmol) in DCM (6 mL) and ethanol (2 mL) was stirred at room temperature for 1 h. NaBH(OAc)₃ (162 mg, 0.76 mmol) was added, and the reaction mixture was stirred at room temperature for an additional 1 h.

[0711] The reaction mixture was diluted with DCM (50 mL) and washed with saturated aqueous NaHCO₃ (2×50 mL) and brine (50 mL), The organic layer was separated, dried over MgSO₄, filtered, and concentrated in vacuo to give a residue. The residue was purified by normal phase chromatography using a gradient from 10 to 50% (10% MeOH in EtOAc)/DCM with 1% Et3N additive to afford 7-(2,7-dimethyl-2H-indazol-5-yl)-5-fluoro-3-(1-methylpiperidin-4-yl)quinazolin-4(3H)-one (20 mg, 39%) as a solid. LCMS (ES, m/z): 405.8 [M+H]⁺. ¹H NMR (CHCl₃-d, 400 MHz): δ_{H} 8.14 (1H, s), 7.99 (1H, s), 7.80 (1H, s), 7.75 (1H, s), 7.45 (1H, d, J=12.1 Hz), 7.37 (1H, s), 4.85-4.93 (1H, m), 4.27 (3H, s), 3.02-3.05 (2H, m), 2.70 (3H, s), 2.37 (3H, s), 2.18-2.25 (2H, m), 1.99 (4H, bs).

### Example 48

### Synthesis of Compound 234

### Synthesis of Intermediate B97

[0712] Tert-butyl 4-(7-(2,7-dimethyl-2H-indazol-5-yl)-8-fluoro-4-oxoquinazolin-3(4H)-yl)piperidine-1-carboxylate was prepared according to the procedure described in Example 61, where 8-fluoro-2-methyl-6-(4,4,5,5-tetramethyl-1,3,2-dioxaborolan-2-yl)imidazo[1,2-a]pyridine was replaced with 2,7-dimethyl-5-(4,4,5,5-tetramethyl-1,3,2-dioxaborolan-2-yl)-2H-indazole in step 3. Tert-butyl 4-(7-(2,7-dimethyl-2H-indazol-5-yl)-8-fluoro-4-oxoquinazolin-3(4H)-yl)piperidine-1-carboxylate was obtained as a solid. LCMS (ES, m/z): 492.2 [M+H]⁺

### Synthesis of Compound 234

[chemical structure]

[0714] To a solution of tert-butyl 4-(7-(2,7-dimethyl-2H-indazol-5-yl)-8-fluoro-4-oxoquinazolin-3 (4H)-yl)piperidine-1-carboxylate (103 mg, 0.21 mmol) in methanol (4.0 mL) was added 4 M HCl in dioxane (4.0 mL). The reaction mixture was stirred at room temperature for 1 h, then concentrated in vacuo to give a residue. The residue was purified by reverse phase chromatography using a gradient from 5 to 50% of acetonitrile in water containing 0.1% formic acid to afford a solid that was dissolved in water (2 mL), neutralized with 10% ammonium hydroxide (1 ml), and lyophilized to afford 7-(2,7-dimethyl-2H-indazol-5-yl)-8-fluoro (piperidin-4-yl)quinazolin-4(3H)-one (70 mg, 85%). LCMS (ES, m/z): 391.9 [M+H]⁺. ¹H NMR (CHCl₃-d, 400 MHz): δ_{H} 8.24 (1H, s), 8.13 (1H, d, J=8.4 Hz), 7.98 (1H, s), 7.78 (1H, s), 7.63 (1H, t, J=7.5 Hz), 7.30 (1H, s), 4.97 (1H, t, J=12.2 Hz), 4.28 (3H, s), 3.30 (2H, d, J=12.3 Hz), 2.87 (2H, t, J=12.0 Hz), 2.70 (3H, s), 2.02 (2H, d, J=11.7 Hz), 1.85-1.94 (2H, m).

### Example 49

### Synthesis of Compound 235

### Synthesis of Compound 235

[chemical structure]

[0716] A mixture of 7-(2,7-dimethyl-2H-indazol-5-yl)-8-fluoro-3-(piperidin-4-yl)quinazolin-4(3H)-one (41 mg, 0.11 mmol) and formaldehyde (37% in water, 16 mg, 0.043 mL, 0.52 mmol) in DCM (6 mL) and ethanol (2 mL) was stirred at room temperature for 1 h. NaBH(OAc)₃ (133 mg, 0.63 mmol) was added, and the reaction mixture was stirred at room temperature for an additional 1 h. The reaction mixture was diluted with DCM (50 mL) and washed with saturated aqueous NaHCO₃ (2×50 mL) and brine (50 mL). The organic layer was separated, dried over MgSO₄, filtered, and concentrated in vacuo to give a residue. The residue was purified by normal phase chromatography using a gradient from 10 to 50% (10% MeOH in EtOAc)/DCM with 1% Et3N additive to afford 7-(2,7-dimethyl-2H-indazol-5-yl)-8-fluoro-3-(1-methylpiperidin-4-yl)quinazolin-4(3H)-one (6.5 mg, 15%) as a solid. LCMS (ES, m/z): 405.8 [M+H]⁺. ¹H NMR (CH₂Cl₂-d₂, 400 MHz): δ_{H} 8.24 (1H, s), 8.10 (1H, d, J=8.4 Hz), 8.02 (1H, s), 7.79 (1H, s), 7.62 (1H, t, J=7.6 Hz), 7.30 (1H, s), 4.76-4.83 (1H, m), 4.25 (3H, s), 3.01 (2H, d, J=11.2 Hz), 2.65 (3H, s), 2.33 (3H, s), 2.17-2.23 (2H, m), 2.02-2.10 (2H, m), 1.95-2.01 (2H, m).

### Example 50

### Synthesis of Compound 236

### Synthesis of Intermediate B98

[chemical structure]

[0718] 2-amino-4-bromobenzoic acid 1 (500 mg, 2.31 mmol) and tert-butyl 7-amino azaspiro[2.5]octane-4-carboxylate (573 mg, 2.41 mmol) were dissolved in DMF (11.6 mL) and cooled in an ice bath. To this solution was added DIPEA (1.2 mL, 6.94 mmol) dropwise, followed by HATU (968 mg, 2.55 mmol). The reaction mixture was stirred and allowed to warm to room temperature over 2 h, then diluted with ethyl acetate (50 mL), and washed with saturated aqueous NH₄Cl (30 mL), followed by saturated NaHCO₃ (30 mL), and brine (40 mL). The organic layer was dried over anhydrous Na₂SO₄, filtered, and concentrated in vacuo to afford tert-butyl 7-(2-amino-4-bromobenzamido)-4-azaspiro[2.5]octane-4-carboxylate (948 mg, 97%) as a solid. LCMS (ES, m/z): 446.1 [M+Na]⁺

### Synthesis of Intermediate B99

[chemical structure]

[0720] Tert-butyl 7-(2-amino-4-bromobenzamido)-4-azaspiro[2.5]octane-4-carboxylate (500 mg, 1.18 mmol) and N,N-Dimethylformamide dimethyl acetal (3.1 mL, 23.6 mmol) were combined and heated at 80° C. for 4 hours. The reaction mixture was diluted with ethyl acetate (50 mL) and washed with saturated NaHCO₃ (30 mL) and brine (2×30 mL). The organic phase was dried over Na₂SO₄, filtered, and concentrated in vacuo to give a residue. The residue was triturated with TBME (20 mL), the solid was collected by filtration and solvent traces were removed under reduced pressure to afford tert-butyl 7-(7-bromo-2-(dimethylamino)-4-oxo-1,4-dihydroquinazolin-3(2H)-yl)-4-azaspiro[2.5]octane-4-carboxylate (466 mg, 83%) as a solid. LCMS (ES, m/z): 479.2 [M+H]⁺. s

[0721] Synthesis of Compound 236

[chemical structure]

[0722] Tert-butyl 7-(7-bromo-2-(dimethylamino)-4-oxo-1,4-dihydroquinazolin-3(2H)-yl) azaspiro[2.5]octane-4-carboxylate (120 mg, 0.25 mmol), 8-fluoro-2-methyl-6-(4,4,5,5-tetramethyl-1,3,2-dioxaborolan-2-yl)imidazo[1,2-a]pyridine (83 mg, 0.30 mmol), PdCl₂(dppf) (18 mg, 0.025 mmol), and Cs₂CO₃ (408 mg, 1.25 mmol) were dissolved in dioxane (2.8 mL) and H₂O (280 μL) and heated at 100° C. for 72 hours. The reaction mixture was diluted with ethyl acetate (40 mL) and washed with saturated NaHCO₃ (25 mL) and brine (2×25 mL). The organic phase was dried over Na₂SO₄, filtered, and concentrated in vacuo to give a residue. The residue was purified by flash chromatography on a silica gel column using a gradient of 0-20% MeOH in DCM. Selected fractions were combined and evaporated in vacuo to give a solid. To the solid was added neat formic acid (3 mL) and the reaction mixture was stirred vigorously at 70° C. for 2 h, then concentrated in vacuo to give a residue and the residue dissolved in water (6 mL). The aqueous phase was washed with DCM (2×5 mL) and neutralized with (NH₄)₂CO₃ to form a suspension. The resulting suspension was cooled down to 4° C. and the precipitate was collected by vacuum filtration. The solid was washed with cold water and dried under high vacuum at room temperature overnight to afford 7-(8-fluoro-2-methylimidazo[1,2-a]pyridin-6-yl)-3-(4-azaspiro[2.5]octan-7-yl)quinazolin-4(3H)-one (36 mg, 36%) as a solid. LCMS (ES, m/z): 404.2 [M+H]⁺. ¹H NMR (DMSO-d₆, 300 MHz): δ 9.00 (1H, s), 8.48 (1H, s), 8.22 (1H, d, J=8.4 Hz), 8.03 (1H, s), 7.91 (1H, d, J=8.8 Hz), 7.85 (1H, s), 7.68 (1H, d, J=12.6 Hz), 4.90 (1H, m), 3.04 (1H, d, J=13.4 Hz), 2.72 (1H, m), 2.39 (3H, s), 1.85-1.98 (2H, br m), 1.23 (1H, d, J=12.2 Hz), 0.60 (1H, m), 0.45 (4H, m).

### Example 51

### Synthesis of Compound 237

### Synthesis of Intermediate B100

[chemical structure]

[0724] 2-amino-4-bromobenzoic acid (500 mg, 2.31 mmol) and tert-butyl 4-amino-2,2-dimethylpiperidine-1-carboxylate (577 mg, 2.50 mmol) were dissolved in DMF (11.6 mL) and cooled in an ice bath. To this solution was added DIPEA (1.2 mL, 6.94 mmol) dropwise, followed by HATU (968 mg, 2.55 mmol). The reaction mixture was stirred and allowed to warm to room temperature over 2 h. The reaction mixture was diluted with ethyl acetate (50 mL) and washed with saturated aqueous NH₄Cl (30 mL), followed by saturated NaHCO₃ (30 mL), and brine (40 mL). The organic layer was dried over anhydrous Na₂SO₄, filtered and concentrated in vacuo to afford tert-butyl 4-(2-amino-4-bromobenzamido)-2,2-dimethylpiperidine-1-carboxylate (961 mg, 97%) as a solid. LCMS (ES, m/z): 448.1 [M+Na]⁺.

### Synthesis of Intermediate B101

[chemical structure]

[0726] Tert-butyl 4-(2-amino-4-bromobenzamido)-2,2-dimethylpiperidine-1-carboxylate (500 mg, 1.18 mmol) and N,N-Dimethylformamide dimethyl acetal (3.1 mL, 23.6 mmol) were combined in a sealed tube and heated at 80° C. for 4 h. The reaction mixture was diluted with ethyl acetate (50 mL) and washed with saturated NaHCO₃ (30 mL) and brine (2×30 mL). The organic phase was dried over Na₂SO₄, filtered, and concentrated in vacuo to give a residue. The residue was triturated with TBME (20 mL), the solid was collected by filtration and solvent traces were removed under reduced pressure to afford tert-butyl 4-(7-bromo-2-(dimethylamino)-4-oxo-1,4-dihydroquinazolin-3(2H)-yl)-2,2-dimethylpiperidine-1-carboxylate (463 mg, 82%) as a solid. LCMS (ES, m/z): 481.2 [M+H]⁺.

### Synthesis of Compound 237

[chemical structure]

[0728] Tert-butyl 4-(7-bromo-2-(dimethylamino)-4-oxo-1,4-dihydroquinazolin-3(2H)-yl)-2,2-dimethylpiperidine-1-carboxylate (120 mg, 0.25 mmol), 8-fluoro-2-methyl-6-(4,4,5,5-tetramethyl-1,3,2-dioxaborolan-2-yl)imidazo[1,2-a]pyridine (83 mg, 0.30 mmol), PdCl₂(dppf) (18 mg, 0.025 mmol), and Cs₂CO₃ (408 mg, 1.25 mmol) were dissolved in dioxane (2.8 mL) and H₂O (280 μL) and heated at 100° C. for 72 h. The reaction mixture was diluted with ethyl acetate (40 mL) and washed with saturated NaHCO₃ (25 mL) and brine (2×25 mL). The organic phase was dried over Na₂SO₄, filtered, and concentrated in vacuo to give a residue. The residue was purified by flash chromatography on a silica gel column using a gradient of 0-20% MeOH in DCM. Selected fractions were combined and evaporated in vacuo to give a solid. To the solid was added neat formic acid (3 mL), and the reaction mixture was stirred vigorously at 70° C. for 2 h. The reaction mixture was concentrated in vacuo to give a residue and the residue was purified by flash chromatography on a C18 column using a gradient of 5-70% MeCN in water with 0.1% formic acid additive. Selected fractions were combined, neutralized with (NH₄)₂CO_{3,} and lyophilized to afford 3-(2,2-dimethylpiperidin-4-yl)-7-(8-fluoro-2-methylimidazo[1,2-a]pyridin-6-yl)quinazolin-4(3H)-one (49 mg, 48%) as a solid. LCMS (ES, m/z): 406.2 [M+H]⁺. ¹H NMR (DMSO-d₆, 300 MHz): δ 9.00 (1H, d, J=1.5 Hz), 8.46 (1H, s), 8.27 (1H, s), 8.23 (1H, d, J=8.4 Hz), 8.04 (1H, d, J=1.8 Hz), 7.92 (1H, dd, J=8.4, 1.9 Hz), 7.86 (1H, d, J=3.1 Hz), 7.69 (1H, d, J=12.6 Hz), 4.98 (1H, m), 3.01 (2H, m), 2.39 (3H, s), 1.76-2.01 (4H, br m), 1.23 (3H, s), 1.18 (3H, s).

### Example 52

### Synthesis of Compound 188

### Synthesis of Intermediate B102

[chemical structure]

[0730] A mixture of 4-bromo-3-fluorobenzoic acid (1.0g, 4.56 mmol, 1.00 equiv), DMF (20.0 mL), 2-methylpropan-2-amine (0.4g, 5.48 mmol, 1.20 equiv), HATU (2.1g, 5.45 mmol, 1.20 equiv), and DIEA (1.7 g, 13.69 mmol, 3.00 equiv) was stirred for 4 h at 35° C. The reaction mixture was quenched with water (40 mL). The resulting solution was extracted with ethyl acetate (3×40 mL), and the organic layers combined. The resulting mixture was washed with 1/2 saturated aqueous NaCl (3 ×100 mL) and saturated aqueous NaCl (1 ×100 mL). The organic layer was dried over anhydrous sodium sulfate, filtered, and the filtrate concentrated under vacuum to give a residue. The residue was purified by silica gel column chromatography, eluted with ethyl acetate/petroleum ether to afford 4-bromo-N-tert-butyl-3-fluorobenzamide as a solid (1.0 g, 79.8%). LCMS (ES, m/z): 274 [M+H]⁺.

### Synthesis of Intermediate B103

[chemical structure]

[0732] A solution of 4-bromo-N-tert-butyl-3-fluorobenzamide (900.0 mg, 3.28 mmol, 1.00 equiv) in THF (18.00 mL) was maintained under a nitrogen atmosphere. To the solution was added lithiobis(propan-2-yl)amine (703.3 mg, 6.56 mmol, 2.00 equiv) dropwise with stirring at −60 ° C. The reaction mixture was stirred for 30 min at −45° C. To the reaction mixture was added ethyleneoxide (1446.2 mg, 32.83 mmol, 10.00 equiv), while stirring at 0° C.The resulting solution was stirred for 1 h at room temperature, then quenched with 1/2 saturated aqueous NaCl (50 mL). The resulting solution was extracted with ethyl acetate (3×50 mL), and the organic layers combined. The resulting mixture was washed with saturated aqueous NaCl (1 ×150 mL). The organic layer was dried over anhydrous sodium sulfate, filtered, and the filtrate concentrated under vacuum to give a residue. The residue was purified by silica gel column chromatography, eluted with ethyl acetate/petroleum ether to afford 4-bromo-N-tert-butyl-3-fluoro-2-(2-hydroxyethyl)benzamide (800 mg, 76.5%) as a solid. LCMS (ES, m/z): 318 [M+H]⁺.

### Synthesis of Intermediate B104

[chemical structure]

[0734] A mixture of 4-bromo-N-tert-butyl-3-fluoro-2-(2-hydroxyethyl) benzamide (700.0 mg, 2.20 mmol, 1.00 equiv), toluene (35.00 mL), THF (3.50 mL), TsOH (454.6 mg, 2.64 mmol, 1.20 equiv) was stirred for 1 h at 100° C. The reaction mixture was concentrated under vacuum, then quenched with 1/2 saturated aqueous NaCl (50 mL). The resulting solution was extracted with ethyl acetate (3×50 mL), and the organic layers combined. The combined organic layers were washed with saturated aqueous NaCl (1×150 mL), dried over anhydrous sodium sulfate, and filtered. The filtrate was concentrated under vacuum to give a residue. The residue was purified by silica gel column chromatography, eluted with ethyl acetate/petroleum ether to afford 6-bromo-5-fluoro-3,4-dihydro-2-benzopyran-1-one (530 mg, 98.3%) as a solid. LCMS (ES, m/z): 245 [M+H]⁺.

### Synthesis of Intermediate B105

[chemical structure]

[0736] To tert-butyl 4-aminopiperidine-1-carboxylate (527.1 mg, 2.63 mmol, 1.50 equiv) in DCM (5.00 mL) was added AlMe₃ (189.7 mg, 2.63 mmol, 1.50 equiv) dropwise at 0° C. with stirring under a nitrogen atmosphere. The resulting solution was stirred for 30 min at room temperature. To the reaction mixture was added 6-bromo-5-fluoro-3,4-dihydro-2-benzopyran-1-one (430.0 mg, 1.75 mmol, 1.00 equiv), with stirring at room temperature. The resulting solution was stirred for 30 min at room temperature and for an additional 1 h at 40° C. The reaction mixture was quenched with water. The resulting solution was extracted with ethyl acetate (3×50 mL), and the organic layers combined. The resulting mixture was washed with saturated aqueous NaCl (1×150 mL), dried over anhydrous sodium sulfate, and filtered. The resulting mixture was concentrated under vacuum to give a reisude. The residue was purified by silica gel column chromatography, eluted with ethyl acetate/petroleum ether to afford tert-butyl 4-[4-bromo-3-fluoro-2-(2-hydroxyethyl) benzamido]piperidine-1-carboxylate (750 mg, 78.1%) as a solid. LCMS (ES, m/z): 445 [M+H]⁺.

### Synthesis of Intermediate B106

[chemical structure]

[0738] To a mixture of tert-butyl 4-[4-bromo-3-fluoro-2-(2-hydroxyethyl)benzamido]piperidine-1-carboxylate (700.0 mg, 1.57 mmol, 1.00 equiv), THF (70 mL), and PPh₃ (824.5 mg, 3.14 mmol, 2.00 equiv) was added TBAD (723.8 mg, 3.14 mmol, 2.00 equiv) dropwise while stirring at 0° C. The reaction mixture was stirred for 2 h at room temperature, then quenched with water. The resulting mixture was extracted with ethyl acetate (3×100 mL). The combined organic layers were washed with saturated aqueous NaCl (300 mL), dried over anhydrous sodium sulfate, and filtered. After filtration, the filtrate was concentrated under reduced pressure to give a reside. The residue was purified by silica gel column chromatography, eluted with ethyl acetate/petroleum ether to afford tert-butyl 4-(6-bromo-5-fluoro-1-oxo-3,4-dihydroisoquinolin-2-yl)piperidine-1-carboxylate (600 mg, 89.3%) as a solid. LCMS (ES, m/z): 427 [M+H]⁺.

### Synthesis of Intermediate B107

[chemical structure]

[0740] A mixture of tert-butyl 4-(6-bromo-5-fluoro-1-oxo-3,4-dihydroisoquinolin-2-yl)piperidine-1-carboxylate (80.0 mg, 0.18 mmol, 1.00 equiv), 2,8-dimethylimidazo[1,2-b]pyridazin-6-ylboronic acid (42.91 mg, 0.224 mmol, 1.2 equiv), K₃PO₄(aq) (119.2 mg, 0.56 mmol, 3.00 equiv), H₂O (0.8 mL, 44.407 mmol, 237.20 equiv)), dioxane (4 mL, 47.216 mmol, 252.20 equiv) and 2nd Generation XPhos precatalyst (14.73 mg, 0.019 mmol, 0.1 equiv)\ was stirred for 6 hat 80° C. The reaction mixture was quenched with water (20 mL), then extracted with ethyl acetate (3×20 mL). The combined organic layers were washed with saturated NaCl (50 mL), dried over anhydrous sodium sulfate, and filtered. After filtration, the filtrate was concentrated under reduced pressure to give a residue. The residue was purified by silica gel column chromatography, eluted with ethyl acetate/petroleum ether to afford tert-butyl 4-(6-{2,8-dimethylimidazo[1,2-b]pyridazin-6-yl}-5-fluoro-1-oxo-3,4-dihydroisoquinolin-2-yl)piperidine-1-carboxylate (60 mg, 64.93%) as an oil. LCMS (ES, m/z): 494 [M+H]⁺.

### Synthesis of Compound 188

[chemical structure]

[0742] A mixture of tert-butyl-4-(6-{2,8-dimethylimidazo[1,2-b]pyridazin-6-yl}-5-fluoro-1-oxo-3,4-dihydroisoquinolin-2-yl) piperidine-1-carboxylate (50 mg, 0.101 mmol, 1.00 equiv), DCM (2.0 mL), and TFA(0.5 mL) was stirred for 30 min at room temperature under a nitrogen atmosphere. The resulting mixture was concentrated under vacuum to give a residue. The residue was purified by Chiral-Prep-HPLC (Column, Xselect CSH OBD Column 30*150 mm 5 um, n; Mobile Phase A, water (10 mmol/L NH₄HCO₃), Mobile Phase B, CAN; Gradient 5% B up to 45% B in 8 min) to afford 6-{2,8-dimethylimidazo[1,2-b]pyridazin-6-yl}-5-fluoro-2-(piperidin-4-yl)-3,4-dihydroisoquinolin-1-one (21.8 mg, 54.37%) as a solid. LCMS (ES, m/z): 394 [M+H]⁺. ¹H-NMR (400 MHz, DMSO-d₆) δ 8.11 (s, 1H), 7.86 (d, J=8.1 Hz, 1H), 7.75 (t, J=7.7 Hz, 1H), 7.38 (dd, J=2.3, 1.2 Hz, 1H), 4.59 — 4.48 (m, 1H), 3.53 (t, J=6.5 Hz, 2H), 3.02 (q, J=7.1 Hz, 4H), 2.61 (d, J=1.1 Hz, 3H), 2.59 — 2.54 (m, 2H), 2.42 (s, 3H), 1.63 (qd, J=11.8, 3.9 Hz, 2H), 1.57 — 1.49 (m, 2H).

### Example 53

### Synthesis of Compounds 267-270, 281, and 282

### Synthesis of Intermediate B108

[chemical structure]

[0744] To 4-bromo-2-methylbenzoic acid (49.0 g, 227.85 mmol, 1.00 equiv) in THF (500 mL) was added LDA (24.4 g, 227.85 mmol, 1 equiv) dropwise at −40° C. under nitrogen atmosphere. The resulting mixture was stirred for 30 min at −40° C. under nitrogen atmosphere, then paraformaldehyde (82.1 g, 911.43 mmol, 4 equiv) was added dropwise at 15° C. under nitrogen atmosphere. The resulting mixture was stirred for 1 h at room temperature under nitrogen atmosphere. The reaction mixture was quenched with 3N HCl (500 mL) at 0° C., and extracted with ethyl acetate (3×500 mL). The combined organic layers were washed with brine (1×1000 mL), dried over anhydrous Na₂SO₄, and filtered. After filtration, the filtrate was concentrated under reduced pressure to give a residue. The residue was purified by silica gel column chromatography, eluted with PE/EA (10:01) to afford 6-bromo-3,4-dihydro-2-benzopyran-1-one (5.5 g, 10.6%) as a solid. LCMS (ES, m/z): 227 [M+H]⁺.

### Synthesis of Intermediate B109

[chemical structure]

[0746] A solution of 6-bromo-3,4-dihydro-2-benzopyran-1-one (4.1g, 18.05 mmol, 1.00 equiv), 2,8-dimethylimidazo[1,2-b]pyridazin-6-ylboronic acid (4.1 g, 21.66 mmol, 1.2 equiv), Pd(PPh₃)₄ (2.1 g, 1.81 mmol, 0.1 equiv), and K₃PO₄ (9.6 g, 45.14 mmol, 2.5 equiv) in dioxane (40 mL) and water (8 mL) was stirred overnight at 90° C. under nitrogen atmosphere. The resulting mixture was diluted with water (100 mL), then extracted with ethyl acetate (3×100 mL). The combined organic layers were washed with brine (1×200 mL), dried over anhydrous Na₂SO₄, and filtered. After filtration, the filtrate was concentrated under reduced pressure to give a residue. The residue was purified by silica gel column chromatography, eluted with PE/EA (10:01) to afford 6-{2,8-dimethylimidazo[1,2-b]pyridazin-6-yl}-3,4-dihydro-2-benzopyran-1-one (3.0 g, 56.6%) as a solid. LCMS (ES, m/z): 294 [M+H]⁺.

### Synthesis of Intermediate B110

[chemical structure]

[0748] To a stirred solution of tert-butyl 3-aminopyrrolidine-1-carboxylate (139.4 mg, 0.75 mmol, 1.1 equiv) in DCM (4 mL) was added AlMe₃ (24.6 mg, 0.34 mmol, 0.5 equiv) dropwise at 0° C. under nitrogen atmosphere. To the above mixture was added 6-{2,8-dimethylimidazo[1,2-b]pyridazin-6-yl}-3,4-dihydro-2-benzopyran-1-one (200.0 mg, 0.68 mmol, 1.00 equiv) dropwise at 0° C. The resulting mixture was stirred for an additional 4 h at 40° C. The resulting mixture was diluted with water (40.0 mL), then extracted with CH₂Cl₂ (3×40 mL). The combined organic layers were washed with brine (1×40 mL), dried over anhydrous Na₂SO₄, and filtered. After filtration, the filtrate was concentrated under reduced pressure to give a residue. The residue was purified by silica gel column chromatography, eluted with CH₂Cl₂/MeOH (96:04) to afford tert-butyl 3-(4-{2,8-dimethylimidazo[1,2-b]pyridazin-6-yl}-2-(2-hydroxyethyl)benzamido)pyrrolidine-1-carboxylate (230.0 mg, 70.3%) as a solid. LCMS (ES, m/z): 480 [M+H]⁺.

### Synthesis of Intermediate B111

[chemical structure]

[0750] To a stirred solution of tert-butyl 3-(4-{2,8-dimethylimidazo[1,2-b]pyridazin-6-yl}-2-(2-hydroxyethyl)-benzamido)pyrrolidine-1-carboxylate (230.0 mg, 0.48 mmol, 1.00 equiv) and PPh₃ (251.6 mg, 0.96 mmol, 2 equiv) in THF (25 mL) was added TBAD (220.6 mg, 0.96 mmol, 2 equiv) dropwise at 0° C. under nitrogen atmosphere. The resulting mixture was stirred for 2 h at room temperature under nitrogen atmosphere. The resulting mixture was extracted with CH₂Cl₂ (3×30 mL). The combined organic layers were washed with brine (1×30 mL), dried over anhydrous Na₂SO₄, and filtered. After filtration, the filtrate was purified by silica gel column chromatography, eluted with PE/EA (0 :1) to afford tert-butyl 3-(6-{2,8-dimethylimidazo[1,2-b]pyridazin-6-yl}-1-oxo-3,4-dihydroisoquinolin-2-yl)pyrrolidine-1-carboxylate (120.0 mg, 54.21%) as a solid. LCMS (ES, m/z): 462 [M+H]⁺.

### Synthesis of Compound 269

[chemical structure]

[0752] A solution of tert-butyl 3-(6-{2,8-dimethylimidazo[1,2-b]pyridazin-6-yl}-1-oxo-3,4-dihydroisoquinolin-2-yl)pyrrolidine-1-carboxylate (120.0 mg, 0.26 mmol, 1.00 equiv) in TFA (0.75 mL) was stirred for 1 h at room temperature. The resulting mixture was concentrated under vacuum to afford 6-{2,8-dimethylimidazo[1,2-b]pyridazin-6-yl}-2-(pyrrolidin-3-yl)-3,4-dihydroisoquinolin-1-one (150 mg) as an oil. The crude product (75 mg) was purified by Prep-HPLC (Column:)(Bridge Prep OBD C18 Column, 30*150 mm, Sum; Mobile Phase A: Water (10 mmol/L NH₄HCO₃), Mobile Phase B: ACN; Flow rate: 60 mL/min; Gradient: 5% B to 35% B in 8 min) to afford 6-{2,8-dimethylimidazo[1,2-b]pyridazin-6-yl}-2-(pyrrolidin-3-yl)-3,4-dihydroisoquinolin-1-one (12.2 mg, 12.9%) as a solid.

### Synthesis of Compound 282

[chemical structure]

A solution of 6-{2,8-dimethylimidazo[1,2-b]pyridazin-6-yl}-2-(pyrrolidin-3-yl)-3,4-dihydroisoquinolin-1-one (75.0 mg, 0.21 mmol, 1.00 equiv) and CH₂O (62.3 mg, 2.07 mmol, 10 equiv) in methanol (2 mL) was stirred for 30 min at room temperature. To the resulting mixture was added NaBH3CN (26.1 mg, 0.41 mmol, 2 equiv). The resulting mixture was stirred for an additional 1 h at room temperature, then filtered. The filtrate was purified by Prep-HPLC (Column: YMC-Actus Triart C18, 30*150 mm, 5 um; Mobile Phase A: Water (10 mmol/L NH₄HCO₃), Mobile Phase B: ACN; Flow rate: 60 mL/min; Gradient: 10% B to 65% B in 8 min) to afford 6-{2,8-dimethylimidazo[1,2-b]pyridazin-6-yl}-2-(1-methylpyrrolidin-3-yl)-3,4-dihydroisoquinolin-1-one (29.8 mg, 36.6%) as a solid.

[0754] Compounds 267-270, 281, and 282 were prepared according to the procedures outlined herein. outlined in this Example 53 and generalized by Scheme C. The table below provides intermediates used in these procedures and final compound characterization data.

| | | LCMS | |
|---|---|---|---|
| | | (ESI, | |
| | | m/z) | |
| Compound No. and Structure | Coupling Reagent | [M + H]⁺ | ¹H NMR δ |
| [chemical structure] | [chemical structure] | 390 | (400 MHz, DMSO-d₆) δ 8.07 (s, 1H), 8.00 (s, 2H), 7.97 (s, 1H), 7.68 (d, J = 1.3 Hz, 1H), 4.45 (tt, J = 12.0, 4.0 Hz, 1H), 3.49 (t, J = 6.5 Hz, 2H), 3.02 (t, J = 6.5 Hz, 2H), 2.90- 2.83 (m, 2H), 2.61 (s, 3H), 2.41 (s, 3H), 2.20 (s, 3H), 2.05-1.95 (m, 2H), 1.80 (qd, J = 12.2, 3.9 Hz, 2H), 1.59-1.50 (m, 2H) |
| [chemical structure] | [chemical structure] | 390 | (400 MHz, DMSO-d₆ δ 8.08 (s, 1H), 8.00 (s, 2H), 7.97 (s, 1H), 7.68 (s, 1H), 4.57 (tt, J = 12.1, 4.2 Hz, 1H), 3.48 (t, J = 6.4 Hz, 2H), 3.01 (q, J = 5.2, 4.3 Hz, 3H), 2.69-2.58 (m, 5H), 2.41 (s, 3H), 2.06 (s, 1H), 1.54 (tdd, J = 16.5, 10.2, 3.7 Hz, 3H), 1.27 (q, J = 11.6 Hz, 1H), 1.03 (d, J = 6.2 Hz, 3H) |
| [chemical structure] | [chemical structure] | 376 | (400 MHz, DMSO-d₆) δ 8.07 (s, 1H), 7.98 (d, J = 10.4 Hz, 3H), 7.69 (s, 1H), 5.27 (dt, J = 9.0, 4.8 Hz, 1H), 3.64 (p, J = 6.1 Hz, 2H), 3.06 (t, J = 6.5 Hz, 2H), 2.84 (t, J = 9.2 Hz, 1H), 2.74 (dd, J = 10.0, 3.6 Hz, 1H), 2.61 (s, 3H), 2.48 (s, 1H), 2.41 (s, 3H), 2.29 (s, 3H), 2.27- 2.09 (m, 2H), 1.78 (ddt, J = 13.7, 7.9, 3.9 Hz, 1H) |
| [chemical structure] | [chemical structure] | 362 | (400 MHz, DMSO-d₆) δ 8.05-7.96 (m, 3H), 7.94 (d, J = 1.7 Hz, 1H), 7.61 (q, J = 1.1 Hz, 1H), 5.10 (ddd, J = 14.5, 8.5, 5.8 Hz, 1H), 3.64-3.55 (m, 2H), 3.10-2.94 (m, 4H), 2.81 (td, J = 11.7, 11.2, 6.4 Hz, 2H), 2.63 (d, J = 1.1 Hz, 3H), 2.44 (d, J = 0.8 Hz, 3H), 2.06-1.93 (m, 1H), 1.75 (dq, J = 13.6, 7.1 Hz, 1H) |
| [chemical structure] | [chemical structure] | 404 | (400 MHz, DMSO-d₆) δ 8.05 (s, 1H), 7.99 (d, J = 1.1 Hz, 2H), 7.95 (s, 1H), 7.65 (d, J = 1.3 Hz, 1H), 4.92-4.79 (m, 1H), 3.46 (t, J = 6.6 Hz, 2H), 3.03 (dd, J = 8.0, 4.3 Hz, 4H), 2.60 (d, J = 1.0 Hz, 3H), 2.40 (s, 3H), 1.77-1.59 (m, 3H), 1.59-1.50 (m, 1H), 1.24 (d, J = 16.7 Hz, 6H) |
| [chemical structure] | [chemical structure] | 404 | (400 MHz, DMSO-d₆) δ 8.08 (s, 1H), 8.03-7.96 (m, 3H), 7.69 (d, J = 1.3 Hz, 1H), 4.50 (s, 1H), 3.50 (t, J = 6.4 Hz, 2H), 3.03 (t, J = 6.5 Hz, 4H), 2.64-2.59 (m, 3H), 2.41 (s, 5H), 2.09 (m,2H), 1.81 (d, J = 12.5 Hz, 2H), 1.60 (d, J = 12.1 Hz, 2H), 1.04 (t, J = 7.2 Hz, 3H) |

### Example 54

### Synthesis of Compound 252

### Synthesis of Intermediate B112

[chemical structure]

[0756] To a mixture of tert-butyl 4-[1-oxo-6-(4,4,5,5-tetramethyl-1,3,2-dioxaborolan-2-yl)-3,4-dihydroisoquinolin-2-yl]piperidine-1-carboxylate (90.00 mg, 0.197 mmol, 1.00 equiv) and 6-bromo-2-methyl-8-(trifluoromethyl)imidazo[1,2-a]pyridine (66.04 mg, 0.236 mmol, 1.20 equiv) in 1,4-dioxane (4 mL) and water (1 mL) was added Pd(dppf)Cl₂ (7.21 mg, 0.010 mmol, 0.05 equiv) and K₂CO₃ (81.76 mg, 0.591 mmol, 3.00 equiv) in portions at 100° C. under nitrogen atmosphere. The resulting mixture was stirred overnight at 80° C. under nitrogen atmosphere. The reaction mixture was quenched with water (10 mL) at room temperature, then extracted with ethyl acetate (3×10 mL), dried over anhydrous Na₂SO₄, and filtered. After filtration, the filtrate was concentrated under reduced pressure to afford tert-butyl 4-[6-[2-methyl-8-(trifluoromethyl) imidazo[1,2-a]pyridin-6-yl]-1-oxo-3,4-dihydroisoquinolin-2-yl]piperidine-1-carboxylate (50 mg, 47.97%) as a solid. LCMS (ES, m/z): 529 [M+H]⁺.

### Synthesis of Compound 252

[chemical structure]

[0758] To tert-butyl 4-[6-[2-methyl-8-(trifluoromethyl)imidazo[1,2-a]pyridin-6-yl]-1-oxo-3,4-dihydroisoquinolin-2-yl]piperidine-1-carboxylate (50.00 mg, 0.095 mmol, 1.00 equiv) in 1,4-dioxane (5 mL) was added HCl (gas) in 1,4-dioxane (5.00 mL) at room temperature under nitrogen atmosphere. The resulting mixture was concentrated under reduced pressure to give a residue. The residue was purified by Prep-HPLC (Column: YMC-Actus Triart C18, 30×150 mm; Mobile Phase A: water (10 mmol/L NH₄HCO₃), Mobile Phase B: ACN; Flow rate: 60 mL/min; Gradient: 15% B to 65% B in 8 min) to afford 6-[2-methyl-8-(trifluoromethyl)imidazo[1,2-a]pyridin-6-yl]-2-(piperidin-4-yl)-3,4-dihydroisoquinolin-1-one (7.1 mg, 17.52%) as a solid. LCMS (ES, m/z): 520 [M+H]⁺. ¹H NMR (400 MHz, DMSO-d6) δ 9.23 (d, J=1.8 Hz, 1H), 8.01-7.95 (m, 2H), 7.90 (s, 1H), 7.80-7.73 (m, 2H), 4.71-4.60 (m, 1H), 3.48 (t, J=6.5 Hz, 2H), 3.21 (d, J=12.5 Hz, 2H), 3.03 (t, J=6.4 Hz, 2H), 2.83 (t, J=11.7 Hz, 2H), 2.42 (s, 3H), 1.88-1.75 (m, 2H), 1.70-1.61 (m, 2H).

### Example 55

### Synthesis of Compounds 264-266, 271-275, and 277-280

### Synthesis of Intermediate B113

[chemical structure]

[0760] A mixture of 6-chloro-2,8-dimethylimidazo[1,2-b]pyridazine (4.50 g, 24.77 mmol, 1.00 equiv), B₂pin₂ (6.92 g, 27.25 mmol, 1.1 equiv), KOAc (7.30 g, 74.33 mmol, 3 equiv), Xphos (1.18 g, 2.47 mmol, 0.1 equiv) and Pd₂(dba)₃CHCl₃ (1.28 g, 1.24 mmol, 0.05 equiv) in dioxane (135 mL) was irradiated with microwave radiation for 1 h at 110° C. The resulting mixture was filtered to afford intermediate B113. LCMS (ES, m/z): 192 [M+H]⁺.

### Synthesis of Intermediate B114

[chemical structure]

[0762] A mixture of 2,8-dimethylimidazo[1,2-b]pyridazin-6-ylboronic acid (3.44 g, 17.99 mmol, 1.5 equiv), 6-bromo-2H-phthalazin-1-one (2.7 g, 11.998 mmol, 1.00 equiv), K₃PO₄ (7.64 g, 35.99 mmol, 3 equiv), and Pd(dppf)Cl₂CH₂Cl₂ (0.98 g, 1.20 mmol, 0.1 equiv) in dioxane (150 mL) and water (30 mL) was stirred overnight at 90° C. under nitrogen atmosphere. The reaction mixture was quenched with water (100 mL) at room temperature. The resulting mixture was filtered, the filter cake was washed with ethyl acetate (3×30 mL). The filtrate was concentrated under reduced pressure to afford 6-{2,8-dimethylimidazo[1,2-b]pyridazin-6-yl}-2H-phthalazin-1-one (3.3 g, 94.4%) as a solid. LCMS (ES, m/z): 292 [M+H]⁺.

### Synthesis of Intermediate B115

[chemical structure]

[0764] A mixture of 6-{2,8-dimethylimidazo[1,2-b]pyridazin-6-yl}-2H-phthalazin-1-one (220.0 mg, 0.75 mmol, 1.00 equiv), tert-butyl 3-(methanesulfonyloxy)pyrrolidine-1-carboxylate (300.5 mg, 1.13 mmol, 1.5 equiv), and K₂CO₃ (313.1 mg, 2.26 mmol, 3 equiv) in DMF (4 mL) was stirred overnight at 100° C. The resulting mixture was diluted with water (10 mL), then extracted with ethyl acetate (3×10 mL). The combined organic layers were washed with brine (1×30 mL), dried over anhydrous Na₂SO₄, and filtered. After filtration, the filtrate was concentrated under reduced pressure to afford tert-butyl 3-(6-{2,8-dimethylimidazo[1,2-b]pyridazin-6-yl}-1-oxophthalazin-2-yl)pyrrolidine-1-carboxylate (270.0 mg, 77.6%) as an oil. LCMS (ES, m/z): 461 [M+H]⁺.

### Synthesis of Compound 264

[chemical structure]

[0766] A solution of tert-butyl 3-(6-{2,8-dimethylimidazo[1,2-b]pyridazin-6-yl}-1-oxophthalazin-2-yl)pyrrolidine-1-carboxylate (270.0 mg, 0.58 mmol, 1.00 equiv) in DCM (3 mL) and TFA (0.75 mL) was stirred for 1 h at room temperature. The resulting mixture was concentrated under vacuum to give a residue. The residue was purified by Prep-HPLC (Column: YMC-Actus Triart C18, 30*150 mm, Sum; Mobile Phase A: Water (10 mmol/L NH₄HCO₃), Mobile Phase B: ACN; Flow rate: 60 mL/min; Gradient: 5% B to 45% B in 8 min) to afford 6-{2,8-dimethylimidazo[1,2-b]pyridazin-6-yl}-2-(pyrrolidin-3-yl)phthalazin-1-one (23 mg, 10.8%) as a solid. LCMS (ES, m/z): 361 [M+H]⁺.

### Synthesis of Compound 271

[chemical structure]

[0768] A mixture of 6-{2,8-dimethylimidazo[1,2-b]pyridazin-6-yl}-2-(pyrrolidin-3-yl)phthalazin-1-one (200.0 mg, 0.55 mmol, 1.00 equiv) and HCHO (166.4 mg, 5.55 mmol, 10 equiv) in methanol (5 mL) was stirred for 30 min at room temperature. To the reaction mixture was added NaBH3CN (69.7 mg, 1.11 mmol, 2 equiv). The resulting mixture was stirred for an additional 1 h at room temperature. The resulting mixture was filtered, the filtrate was purified by Prep-HPLC (Column: YMC-Actus Triart C18, 30*150 mm, Sum; Mobile Phase A: Water(10 mmol/L NH₄HCO₃), Mobile Phase B: ACN; Flow rate: 60 mL/min; Gradient: 45% B to 67% B in 8 min) to afford 6-{2,8-dimethylimidazo[1,2-b]pyridazin-6-yl}-2-(1-methylpyrrolidin-3-yl)phthalazin-1-one (10.9 mg, 5.2%) as a solid. LCMS (ES, m/z): 375 [M+H]⁺.

[0769] Compounds 264-266, 271-275, 277-280 were prepared according to the procedures outlined herein. outlined in this Example 55 and generalized by Scheme D. The table below provides intermediates used in these procedures and final compound characterization data.

| | | LCMS | |
|---|---|---|---|
| | | (ESI, | |
| | | m/z) | |
| Compound No. and Structure | Coupling Reagent | [M + H]⁺ | ¹H NMR δ |
| [chemical structure] | [chemical structure] | 361 | (400 MHz, DMSO-d₆) δ 8.55 (d, J = 7.0 Hz, 2H), 8.45 (dd, J = 8.5, 1.8 Hz, 1H), 8.36 (d, J = 8.5 Hz, 1H), 8.07 (s, 1H), 7.73 (d, J = 1.3 Hz, 1H), 5.49 (dt, J = 12.2, 4.8 Hz, 1H), 3.17 (dd, J = 11.9, 7.4 Hz, 1H), 3.05 (dt, J = 11.3, 7.4 Hz, 1H), 2.91 (ddd, J = 18.2, 11.3, 6.5 Hz, 2H), 2.61 (s, 3H), 2.40 (s, 3H), 2.21- 1.97 (m, 2H) |
| [chemical structure] | [chemical structure] | 375 | (400 MHz, DMSO-d₆) δ 8.61 (d, J = 1.8 Hz, 2H), 8.49 (dd, J = 8.5, 1.8 Hz, 1H), 8.37 (d, J = 8.4 Hz, 1H), 8.12 (d, J = 1.0 Hz, 1H), 7.80 (d, J = 1.2 Hz, 1H), 5.66-5.54 (m, 1H), 2.99 (dd, J = 9.3, 7.9 Hz, 1H), 2.74- 2.65 (m, 2H), 2.64 (d, J = 1.1 Hz, 3H), 2.59 (dd, J = 9.3, 6.3 Hz, 1H), 2.43 (d, J = 0.9 Hz, 3H), 2.30 (s, 3H), 2.25 (ddt, J = 12.8, 9.8, 4.9 Hz, 1H), 2.12 (ddt, J = 12.9, 7.7, 5.1 Hz, 1H) |
| [chemical structure] | [chemical structure] | 389 | (400 MHz, DMSO-d₆) δ 8.52 (s, 1H), 8.47 (s, 1H), 8.39 (d, J = 8.5 Hz, 1H), 8.30 (d, J = 8.5 Hz, 1H), 8.01 (s, 1H), 7.66 (s, 1H), 5.05 (tt, J = 11.7, 4.5 Hz, 1H), 3.23 (d, J = 12.4 Hz, 1H), 3.05 (d, J = 10.5 Hz, 1H), 2.90 (t, J = 12.0 Hz, 1H), 2.58 (s, 3H), 2.38 (s, 3H), 1.86 (td, J = 45.6, 42.0, 11.5 Hz, 4H), 1.17 (d, J = 6.2 Hz, 3H) |
| [chemical structure] | [chemical structure] | 389 | (400 MHz, DMSO-d₆) δ 8.49 (d, J = 2.2 Hz, 2H), 8.41 (dd, J = 8.4, 1.8 Hz, 1H), 8.36 (d, J = 8.4 Hz, 1H), 8.00 (d, J = 1.0 Hz, 1H), 7.65 (d, J = 1.3 Hz, 1H), 5.21 (tt, J = 8.9, 4.5 Hz, 1H), 3.33 (dt, J = 6.9, 4.8 Hz, 1H), 3.00-2.85 (m, 2H), 2.63 (d, J = 1.1 Hz, 3H), 2.42 (d, J = 0.8 Hz, 3H), 2.05 (ddd, J = 13.3, 9.1, 4.6 Hz, 1H), 1.97-1.84 (m, 1H), 1.77 (dq, J = 13.3, 4.9 Hz, 1H), 1.59 (dtd, J = 13.0, 4.8, 1.4 Hz, 1H), 1.15 (d, J = 6.8 Hz, 3H) |
| [chemical structure] | [chemical structure] | 403 | (400 MHz, DMSO-d₆) δ 8.65- 8.58 (m, 2H), 8.51 (dd, J = 8.4, 1.8 Hz, 1H), 8.40 (d, J = 8.4 Hz, 1H), 8.14 (s, 1H), 7.81 (d, J = 1.3 Hz, 1H), 5.01-4.87 (m, 1H), 2.93 (dt, J = 11.4, 3.3 Hz, 1H), 2.67-2.63 (m, 3H), 2.44 (s, 3H), 2.21 (s, 4H), 2.12-1.96 (m, 2H), 1.75 (q, J = 9.0, 6.9 Hz, 3H), 1.08 (d, J = 6.1 Hz, 3H) |
| [chemical structure] | [chemical structure] | 403 | (400 MHz, DMSO-d₆) δ 8.64- 8.55 (m, 2H), 8.50 (dd, J = 8.4, 1.8 Hz, 1H), 8.39 (d, J = 8.4 Hz, 1H), 8.14 (s, 1H), 7.81 (d, J = 1.3 Hz, 1H), 5.23-5.13 (m, 1H), 3.13 (s, 1H), 2.65 (s, 5H), 2.44 (s, 3H), 2.30 (s, 3H), 2.19 (td, J = 11.9, 4.7 Hz, 1H), 2.06 (s, 1H), 1.77 (s, 1H), 1.65 (d, J = 12.4 Hz, 1H), 1.08 (d, J = 6.6 Hz, 3H) |
| [chemical structure] | [chemical structure] | 389 | (400 MHz, DMSO-d₆) δ 8.63- 8.55 (m, 2H), 8.49 (dd, J = 8.4, 1.8 Hz, 1H), 8.39 (d, J = 8.4 Hz, 1H), 8.13 (s, 1H), 7.80 (d, J = 1.3 Hz, 1H), 4.87 (dd, J = 11.2, 6.9 Hz, 1H), 2.92 (d, J = 7.7 Hz, 2H), 2.64 (d, J = 1.0 Hz, 3H), 2.43 (s, 3H), 2.23 (s, 3H), 2.13-1.96 (m, 4H), 1.82-1.71 (m, 2H) |
| [chemical structure] | [chemical structure] | 403 | (400 MHz, DMSO-d₆) δ 8.64- 8.57 (m, 2H), 8.50 (dd, J = 8.4, 1.7 Hz, 1H), 8.40 (d, J = 8.4 Hz, 1H), 8.14 (s, 1H), 7.80 (d, J = 1.2 Hz, 1H), 4.94-4.84 (m, 1H), 3.03 (d, J = 8.6 Hz, 2H), 2.65 (s, 3H), 2.43 (s, 3H), 2.39 (q, J = 7.2, 6.5 Hz, 2H), 2.07-1.94 (m, 4H), 1.78 (d, J = 10.8 Hz, 2H), 1.04 (t, J = 7.2 Hz, 3H) |
| [chemical structure] | [chemical structure] | 401 | (400 MHz, DMSO-d₆) δ 8.60- 8.55 (m, 2H), 8.47 (dd, J = 8.5, 1.7 Hz, 1H), 8.37 (d, J = 8.4 Hz, 1H), 8.10 (s, 1H), 7.75 (d, J = 1.3 Hz, 1H), 5.15 (tt, J = 11.7, 4.1 Hz, 1H), 3.12-3.03 (m, 1H), 2.79 (td, J = 12.9, 3.0 Hz, 1H), 2.63 (s, 3H), 2.42 (s, 3H), 2.36 (t, J = 11.6 Hz, 1H), 1.92 (qd, J = 12.3, 4.3 Hz, 1H), 1.81 (d, J = 12.3 Hz, 1H), 1.20 (dq, J = 12.5, 1.7 Hz, 1H), 0.65 (ddd, J = 9.6, 5.7, 3.6 Hz, 1H), 0.60- 0.53 (m, 1H), 0.50 (dt, J = 9.4, 4.0 Hz, 1H), 0.42 (ddd, J = 9.0, 5.8, 3.2 Hz, 1H) |
| [chemical structure] | [chemical structure] | 403 | (400 MHz, DMSO-d₆) δ 8.67- 8.59 (m, 2H), 8.52 (dd, J = 8.5, 1.8 Hz, 1H), 8.40 (d, J = 8.4 Hz, 1H), 8.14 (s, 1H), 7.81 (s, 1H), 5.36- 5.25 (m, 1H), 3.15-3.10 (m, 2H), 2.65 (s, 3H), 2.44 (s, 3H), 1.97 (s, 1H), 1.85 (s, 2H), 1.76 (d, J = 12.7 Hz, 1H), 1.32 (s, 3H), 1.25 (s, 3H) |
| [chemical structure] | [chemical structure] | 401 | (400 MHz, DMSO-d₆) δ 8.62-8.57 (m, 2H), 8.49 (dd, J = 8.4, 1.7 Hz, 1H), 8.38 (d, J = 8.4 Hz, 1H), 8.13 (s, 1H), 7.80 (s, 1H), 5.27 (p, J = 8.6 Hz, 1H), 3.55 (d, J = 8.3 Hz, 2H), 2.64 (s, 3H), 2.43 (s, 3H), 2.26 (dt, J = 13.3, 8.2 Hz, 2H), 1.75-1.59 (m, 6H) |
| [chemical structure] | [chemical structure] | 363 | (400 MHz, DMSO-d₆) δ 10.05 (s, 1H), 8.75 (d, J = 1.7 Hz, 1H), 8.64 (s, 1H), 8.57 (dd, J = 8.4, 1.8 Hz, 1H), 8.49-8.40 (m, 2H), 8.24 (s, 1H), 4.55 (t, J = 6.0 Hz, 2H), 3.56 (q, J = 5.8 Hz, 2H), 2.88 (d, J = 4.7 Hz, 6H), 2.75 (s, 3H), 2.55 (s, 3H) |
| [chemical structure] | [chemical structure] | 376 | (400 MHz, DMSO-d₆) δ 8.66- 8.60 (m, 2H), 8.52 (dd, J = 8.5, 1.8 Hz, 1H), 8.42 (d, J = 8.4 Hz, 1H), 8.14 (s, 1H), 7.81 (d, J = 1.2 Hz, 1H), 5.16 (tt, J = 11.6, 4.1 Hz, 1H), 4.01 (dd, J = 11.0, 4.4 Hz, 2H), 3.54 (dd, J = 12.6, 10.6 Hz, 2H), 2.66 (d, J = 1.0 Hz, 3H), 2.44 (s, 2H), 1.81-1.72 (m, 2H), 1.24 (s, 1H) |
| [chemical structure] | [chemical structure] | 376 | (400 MHz, DMSO-d₆) δ 9.43 (d, J = 0.8 Hz, 1H), 8.80 (d, J = 1.7 Hz, 1H), 8.64 (dd, J = 8.6, 1.8 Hz, 1H), 8.34 (d, J = 8.6 Hz, 1H), 8.15 (d, J = 0.9 Hz, 1H), 7.84 (d, J = 1.2 Hz, 1H), 5.64 (tt, J = 8.4, 4.0 Hz, 1H), 3.97 (dt, J = 11.5, 4.5 Hz, 2H), 3.62 (ddd, J = 11.7, 8.9, 3.0 Hz, 2H), 2.66 (d, J = 1.0 Hz, 3H), 2.44 (d, J = 0.8 Hz, 3H), 2.24-2.14 (m, 2H), 1.85 (dtd, J = 12.8, 8.7, 3.9 Hz, 2H) |
| [chemical structure] | [chemical structure] | 349 | (400 MHz, DMSO-d₆) δ 8.51 (s, 1H), 8.46 (s, 1H), 8.44-8.37 (m, 1H), 8.31 (d, J = 8.4 Hz, 1H), 8.05 (s, 1H), 7.70 (s, 1H), 4.21 (t, J = 6.5 Hz, 2H), 2.88 (t, J = 6.5 Hz, 2H), 2.60 (s, 3H), 2.40 (s, 3H), 2.31 (s, 3H) |

### Example 56

### Synthesis of Compounds 248-251 and 253-263

### Synthesis of Intermediate B116

[chemical structure]

[0771] A mixture of 6-bromo-2H-phthalazin-1-one (2.00 g, 8.88 mmol, 1.00 equiv),tert-butyl 4-(methanesulfonyloxy)piperidine-1-carboxylate (2.73 g, 9.77 mmol, 1.10 equiv), and K₂CO₃ (2.46 g, 17.77 mmol, 2.00 equiv) in DMF (40.00 mL) was stirred overnight at 100° C. The resulting mixture was diluted with water (100 mL), then extracted with ethyl acetate (3×100 mL). The combined organic layers were washed with brine (1×100 mL), dried over anhydrous Na₂SO₄, and filtered. After filtration, the filtrate was concentrated under reduced pressure to give a residue. The residue was purified by silica gel column chromatography, eluted with PE/EA (72/28) to afford tert-butyl 4-(6-bromo-1-oxophthalazin-2-yl)piperidine-1-carboxylate (2.90 g, 79.92%) as a solid. LCMS (ES, m/z): 408 [M+H]⁺.

### Synthesis of Intermediate B117

[chemical structure]

[0773] A mixture of tert-butyl 4-(6-bromo-1-oxophthalazin-2-yl)piperidine-1-carboxylate (2.60 g, 6.36 mmol, 1.00 equiv), B₂PIN₂ (3.23 g, 12.73 mmol, 2 equiv), Pd(dppf)Cl₂ CH₂Cl₂ (0.52 g, 0.63 mmol, 0.1 equiv), and KOAc (1.87 g, 19.104 mmol, 3 equiv) in dioxane (52.00 mL) was stirred overnight at 80° C. under N2 atmosphere. The resulting mixture was filtered. LCMS (ES, m/z): 456/374 [M+H]⁺.

### Synthesis of Intermediate B118

[chemical structure]

[0775] A mixture of tert-butyl 4-[1-oxo-6-(4,4,5,5-tetramethyl-1,3,2-dioxaborolan-2-yl)phthalazin-2-yl]piperidine-1-carboxylate (125.0 mg, 0.27 mmol, 1.00 equiv), 6-bromo-8-fluoro-2-methylimidazo[1,2-a]pyridine (94.3 mg, 0.41 mmol, 1.50 equiv), Pd(dppf)Cl₂ CH₂Cl₂ (11.2 mg, 0.01 mmol, 0.05 equiv), and K₂CO₃ (113.8 mg, 0.83 mmol, 3.00 equiv) in dioxane (2.00 mL) and water (0.50 mL) was stirred for 12 h at 80° C. under nitrogen atmosphere. The resulting mixture was diluted with water (20 mL), then extracted with ethyl acetate (3×20 mL). The combined organic layers were washed with brine (1×20 mL), dried over anhydrous Na₂SO₄, and filtered. After filtration, the filtrate was concentrated under reduced pressure to give a residue. The residue was purified by silica gel column chromatography, eluted with CH₂Cl_{2/}MeOH (97/3) to afford tert-butyl 4-(6-[8-fluoro-2-methylimidazo[1,2-a]pyridin-6-yl]-1-oxophthalazin-2-yl)piperidine-1-carboxylate (110.0 mg, 83.9%) as an oil. LCMS (ES, m/z): 478 [M+H]⁺.

### Synthesis of Compound 248

[chemical structure]

[0777] A solution of tert-butyl 4-(6-[8-fluoro-2-methylimidazo[1,2-a]pyridin-6-yl]-1-oxophthalazin-2-yl)piperidine-1-carboxylate (110.0 mg, 0.23 mmol, 1.00 equiv) in DCM (2.00 mL) and TFA (0.50 mL) was stirred for 1 h at room temperature. The resulting mixture was concentrated under vacuum. The crude product (100 mg) was purified by Prep-HPLC with the following conditions (Column: YMC-Actus Triart C18, 30*150 mm, 5|im; Mobile Phase A: Water (10 mmol/L NH₄HCO₃), Mobile Phase B: ACN; Flow rate: 60 mL/min; Gradient: 5% B to 50% B in 8 min, 50% B; Wave Length: 220 nm) to afford 6-[8-fluoro-2-methylimidazo[1,2-a]pyridin-6-yl]-2-(piperidin-4-yl)phthalazin-1-one(27.1 mg, 30.74%) as a solid.

[0778] Compounds 248-251 and 253-263 were prepared according to the procedures outlined herein. outlined in this Example 56 and generalized by Scheme E. The table below provides intermediates used in these procedures and final compound characterization data.

| | | LCMS | |
|---|---|---|---|
| | | (ESI, m/z) | |
| Compound No. and Structure | Coupling Reagent | [M + H]⁺ | ¹H NMR δ |
| [chemical structure] | [chemical structure] | 378 | (400 MHz, DMSO-d₆) δ 9.00 (d, J = 1.6 Hz, 1H), 8.49 (s, 1H), 8.38-8.29 (m, 2H), 8.22 (dd, J = 8.4, 2.0 Hz, 1H), 7.89 (d, J = 3.0 Hz, 1H), 7.68 (dd, J = 12.5, 1.6 Hz, 1H), 4.97 (tt, J = 11.7, 4.1 Hz, 1H), 3.09 (d, J = 12.5 Hz, 2H), 2.69-2.59 (m, 2H), 2.40 (s, 3H), 1.88 (qd, J = 12.1, 4.1 Hz, 2H), 1.72 (dd, J = 12.4, 3.7 Hz, 2H). ¹⁹F NMR (376 MHz, DMSO) δ −73.40, −131.85 |
| [chemical structure] | [chemical structure] | 378 | (400 MHz, DMSO-d₆) δ 8.62 (s, 1H), 8.52 (s, 1H), 8.36 (d, J = 1.8 Hz, 1H), 8.34-8.26 (m, 2H), 7.96 (d, J = 1.2 Hz, 1H), 7.35 (dd, J = 12.0, 1.2 Hz, 1H), 4.97 (tt, J = 11.7, 4.1 Hz, 1H), 4.24 (s, 3H), 3.12-3.04 (m, 2H), 2.63 (td, J = 12.6, 2.5 Hz, 2H), 1.88 (qd, J = 12.1, 4.1 Hz, 2H), 1.75-1.67 (m, 2H); ¹⁹F NMR (376 MHz, DMSO) δ −116.30, −116.72, −117.41 |
| [chemical structure] | [chemical structure] | 379 | (400 MHz, DMSO-d₆) δ 8.51 (s, 1H), 8.39 (d, 1H), 8.27 (m, J = 8.4, 1.9 Hz, 2H), 8.10 (d, J = 1.4 Hz, 1H), 7.77 (dd, J = 11.4, 1.5 Hz, 1H), 4.96 (tt, J = 11.7, 4.0 Hz, 1H), 3.12-3.04 (m, 2H), 2.70 (s, 3H), 2.63 (td, J = 12.5, 2.6 Hz, 2H), 1.87 (qd, J = 12.1, 4.1 Hz, 2H), 1.75- 1.66 (m, 2H); ¹⁹F NMR (376 MHz, DMSO) δ −73.40, −125.74 |
| [chemical structure] | [chemical structure] | 395 | (400 MHz, DMSO-d₆) δ 8.51 (s, 1H), 8.44 (d, J = 1.6 Hz, 1H), 8.40-8.31 (m, 2H), 8.27 (dd, J = 8.4, 1.8 Hz, 1H), 7.87 (dd, J = 12.1, 1.7 Hz, 1H), 4.96 (tt, J = 11.6, 4.0 Hz, 1H), 3.12- 3.04 (m, 2H), 2.88 (s, 3H), 2.63 (td, J = 12.5, 2.5 Hz, 2H), 1.87 (qd, J = 12.1, 4.1 Hz, 2H), 1.75-1.66 (m, 2H); ¹⁹F NMR (376 MHz, DMSO) δ −122.53 |
| [chemical structure] | [chemical structure] | 374 | (400 MHz, DMSO-d₆) δ 8.52 (s, 1H), 8.48 (s, 1H), 8.33 (d, J = 8.2 Hz, 1H), 8.01 (d, J = 1.7 Hz, 1H), 7.92 (dd, J = 8.3, 1.7 Hz, 1H), 7.64 (s, 1H), 7.41 (s, 1H), 4.97 (tt, J = 11.6,4.1 Hz, 1H), 3.12-3.04 (m, 2H), 2.63 (td, J = 12.4, 2.4 Hz, 2H), 2.34 (s, 3H), 2.25 (s, 3H), 1.87 (qd, J = 12.1, 4.1 Hz, 2H), 1.71 (dd, J = 12.3, 3.9 Hz, 2H) |
| [chemical structure] | [chemical structure] | 361 | (400 MHz, DMSO-d₆) δ 9.41 (d, J = 1.5 Hz, 1H), 9.09 (d, J = 1.4 Hz, 1H), 8.64-8.57 (m, 2H), 8.48 (dd, J = 8.5, 1.8 Hz, 1H), 8.37 (d, J = 8.5 Hz, 1H), 7.97 (s, 1H), 4.96 (tt, J = 11.6, 4.0 Hz, 1H), 3.12-3.04 (m, 2H), 2.63 (td, J = 12.6, 2.6 Hz, 2H), 2.46 (s, 3H), 1.87 (qd, J = 12.1, 4.1 Hz, 2H), 1.75-1.66 (m, 2H) |
| [chemical structure] | [chemical structure] | 375 | (400 MHz, DMSO-d₆) δ 9.07 (s, 1H), 8.90-8.78 (m, 2H), 8.63 (d, J = 11.6 Hz, 2H), 8.50 (d, J = 8.7 Hz, 2H), 8.37 (d, J = 8.4 Hz, 1H), 5.21 (td, J = 11.4, 5.4 Hz, 1H), 3.41 (s, 2H), 3.17 (q, J = 12.2 Hz, 2H), 2.87 (d, J = 7.5 Hz, 3H), 2.45 (d, J = 3.8 Hz, 3H), 2.21 (q, J = 10.1, 6.8 Hz, 2H), 1.98 (dd, J = 13.7, 3.8 Hz, 2H) |
| [chemical structure] | [chemical structure] | 376 | (400 MHz, DMSO-d₆) δ 8.85 (s, 1H), 8.77 (s, 1H), 8.71 (s, 1H), 8.62 (d, J = 8.4 Hz, 1H), 8.43 (d, J = 8.4 Hz, 1H), 5.01- 4.91 (m, 1H), 3.08 (d, J = 12.1 Hz, 2H), 2.86 (s, 3H), 2.63 (t, J = 11.9 Hz, 2H), 2.53 (s, 3H), 1.87 (qd, J = 12.5, 4.1 Hz, 2H), 1.71 (d, J = 11.4 Hz, 2H) |
| [chemical structure] | [chemical structure] | 375 | (400 MHz, DMSO-d₆) δ 8.60- 8.52 (m, 3H), 8.47 (dd, J = 8.3, 1.7 Hz, 1H), 8.36 (d, J = 8.3 Hz, 1H), 7.67 (s, 1H), 4.96 (tt, J = 11.7, 4.1 Hz, 1H), 3.11- 3.03 (m, 2H), 2.73 (s, 3H), 2.62 (td, J = 12.5, 2.5 Hz, 2H), 2.45 (s, 3H), 1.87 (qd, J = 12.1, 4.1 Hz, 2H), 1.75-1.66 (m, 2H) |
| [chemical structure] | [chemical structure] | 394 | (400 MHz, DMSO-d₆) δ 9.11 (d, J = 1.6 Hz, 1H), 8.50 (s, 1H), 8.34 (dd, J = 5.2, 3.3 Hz, 2H), 8.23 (dd, J = 8.4, 1.8 Hz, 1H), 7.93 (d, J = 1.6 Hz, 1H), 7.88 (s, 1H), 4.98 (tt, J = 11.7, 4.1 Hz, 1H), 3.14-3.06 (m, 2H), 2.66 (td, J = 12.4, 2.5 Hz, 2H), 2.40 (s, 3H), 1.89 (qd, J = 12.2, 4.1 Hz, 2H), 1.77-1.68 (m, 2H) |
| [chemical structure] | [chemical structure] | 374 | (400 MHz, DMSO-d₆) δ 8.92 (d, J = 1.8 Hz, 1H), 8.51 (s, 1H), 8.33 (d, J = 8.4 Hz, 1H), 8.27 (d, J = 1.8 Hz, 1H), 8.19 (dd, J = 8.4, 1.8 Hz, 1H), 7.73 (d, J = 1.1 Hz, 1H), 7.52 (t, J = 1.6 Hz, 1H), 4.96 (tt, J = 11.7, 4.1 Hz, 1H), 3.12-3.04 (m, 2H), 2.63 (td, J = 12.5, 2.5 Hz, 2H), 2.55 (s, 3H), 2.37 (s, 3H), 1.87 (qd, J = 12.1, 4.1 Hz, 2H), 1.75-1.66 (m, 2H) |
| [chemical structure] | [chemical structure] | 296 | (400 MHz, DMSO-d₆) δ 9.12 (d, J = 11.3 Hz, 1H), 8.89 (d, J = 11.4 Hz, 1H), 8.43 (s, 1H), 8.30 (s, 2H), 8.23 (d, J = 8.3 Hz, 1H), 8.18 (d, J = 1.7 Hz, 1H), 8.14 (dd, J = 8.3, 1.7 Hz, 1H), 5.19 (tt, J = 11.6, 4.0 Hz, 1H), 3.41 (d, J = 12.5 Hz, 2H), 3.22-3.07 (m, 2H), 2.21 (qd, J = 13.4, 4.1 Hz, 2H), 1.96 (dd, J = 14.1, 3.8 Hz, 2H) |
| [chemical structure] | [chemical structure] | 374 | (400 MHz, DMSO-d₆) δ 8.53 (s, 1H), 8.45 (s, 1H), 8.31 (d, J = 8.4 Hz, 1H), 8.27 (d, J = 1.8 Hz, 1H), 8.21 (dd, J = 8.4, 1.9 Hz, 1H), 8.01 (d, J = 1.7 Hz, 1H), 7.51 (t, J = 1.5 Hz, 1H), 4.99 (ddd, J = 11.7, 7.7, 4.1 Hz, 1H), 4.22 (s, 3H), 3.15- 3.07 (m, 2H), 2.68 (td, J = 12.5, 2.5 Hz, 2H), 2.60 (s, 3H), 1.90 (qd, J = 12.2, 4.1 Hz, 2H), 1.77-1.68 (m, 2H) |
| [chemical structure] | [chemical structure] | 428 | (400 MHz, DMSO-d₆) δ 9.60 (s, 1H), 9.26 (d, J = 11.2 Hz, 1H), 9.16-9.08 (m, 1H), 8.57 (s, 1H), 8.47 (d, J = 1.9 Hz, 1H), 8.40 (d, J = 8.2 Hz, 2H), 8.32 (dd, J = 8.4, 1.9 Hz, 1H), 8.12 (s, 1H), 5.22 (ddt, J = 11.5, 7.6, 4.0 Hz, 1H), 3.41 (d, J = 12.4 Hz, 2H), 3.23-3.09 (m, 2H), 2.51 (s, 3H), 2.25 (qd, J = 13.3, 4.1 Hz, 2H), 2.03- 1.94 (m, 2H); ¹⁹F NMR (376 MHz, DMSO) δ −61.40, −61.63, −62.12 |
| [chemical structure] | [chemical structure] | 360 | (400 MHz, DMSO-d₆) δ 8.55 (s, 1H), 8.42 (s, 1H), 8.33 (dd, J = 5.1, 3.2 Hz, 2H), 8.25 (dd, J = 8.5, 1.7 Hz, 1H), 8.06 (d, J = 1.5 Hz, 1H), 7.88 (d, J = 8.7 Hz, 1H), 7.51 (dd, J = 8.8, 1.5 Hz, 1H), 4.98 (ddt, J = 11.5, 7.8, 4.1 Hz, 1H), 4.22 (s, 3H), 3.10 (d, J = 12.1 Hz, 2H), 2.72- 2.62 (m, 2H), 1.90 (qd, J = 12.3, 4.0 Hz, 2H), 1.77-1.68 (m, 2H) |

### Example 57

### Synthesis of Compound 283

### Synthesis of Intermediate B119

[chemical structure]

[0780] To a stirred solution of PPh₃ (450.2 mg, 1.72 mmol, 2.5 equiv) in THF (20 mL) was added DIAD (277.6 mg, 1.37 mmol, 2 equiv) dropwise at 0° C. under nitrogen atmosphere. To the reaction mixture was added 6-{2,8-dimethylimidazo[1,2-b]pyridazin-6-yl}-2H-phthalazin-1-one (200.0 mg, 0.69 mmol, 1.00 equiv) and tert-butyl 4-hydroxyazepane-1-carboxylate (192.1 mg, 0.89 mmol, 1.3 equiv) dropwise at 0° C. The resulting mixture was stirred for an additional 1 h at room temperature, then quenched with MeOH. The resulting mixture was concentrated under vacuum to give a residue. The residue was purified by Prep-TLC (CH₂Cl_{2/}MeOH=10:01) to afford tert-butyl 4-(6-{2,8-dimethylimidazo[1,2-b]pyridazin-6-yl}-1-oxophthala-zin-2-yl)azepane-1-carboxylate (60.0 mg, 17.89%) as an oil. LCMS (ES, m/z): 489 [M+H]⁺.

### Synthesis of Compound 283

[chemical structure]

A solution of tert-butyl 4-(6-{2,8-dimethylimidazo[1,2-b]pyridazin-6-yl}-1-oxophthalazin-2-yl)azepane-1-carboxylate (60.0 mg, 0.12 mmol, 1.00 equiv) in TFA (0.5 mL) was stirred for 1 h at room temperature. The resulting mixture was concentrated under vacuum to give a residue. The residue was purified by Prep-HPLC (Column: YMC-Actus Triart C18, 30*150 mm, 5 um; Mobile Phase A: water (10 mmol/L NH₄HCO₃), Mobile Phase B: ACN; Flow rate: 60 mL/min; Gradient: 5% B to 70% B in 8 min) to afford 2-(azepan-4-yl)-6-{2,8-dimethylimidazo[1,2-b]pyridazin-6-yl}phthalazin-1-one (9.1 mg, 18.9%) as a solid. LCMS (ES, m/z): 389 [M+H]⁺. ¹H NMR (400 MHz, DMSO-d₆) δ 8.59 — 8.51 (m, 2H), 8.47 (dd, J=8.4, 1.8 Hz, 1H), 8.40 (d, J=8.4 Hz, 1H), 8.06 (s, 1H), 7.72 (d, J=1.3 Hz, 1H), 5.21 (tt, J=9.7, 4.6 Hz, 1H), 3.49 (d, J=58.9 Hz, 1H), 2.98 — 2.93 (m, 1H), 2.92 — 2.75 (m, 2H), 2.67 (d, J=1.1 Hz, 3H), 2.45 (d, J=0.8 Hz, 3H), 2.33 (p, J=1.9 Hz, 2H), 1.94 — 1.89 (m, 1H), 1.89 — 1.77 (m, 2H), 1.64 (td, J=15.1, 14.3, 6.9 Hz, 1H).

### Example 58

### Synthesis of Compounds 244-246, 284-288, 297-303, and 307

### Synthesis of Intermediate B120

[chemical structure]

[0783] A mixture of tert-butyl 4-(7-bromo-4-oxoquinazolin-3-yl)piperidine-1-carboxylate (1.8 g, 4.41 mmol, 1.00 equiv), bis(pinacolato)diboron (1.23 g, 4.85 mmol, 1.10 equiv), KOAc (1.3 g, 13.23 mmol, 3 equiv), and Pd(dppf)Cl₂.CH₂Cl₂ (180.4 mg, 0.22 mmol, 0.05 equiv) in dioxane (18 mL) was stirred for 1 h at 100° C. under nitrogen atmosphere. The resulting mixture was filtered. LCMS (ES, m/z): 456 [M+H]⁺.

### Synthesis of Intermediate B121

[chemical structure]

[0785] A mixture of tert-butyl 4-[4-oxo-7-(4,4,5,5-tetramethyl-1,3,2-dioxaborolan-2-yl)quinazolin-3-yl]piperidine-1-carboxylate (220.0 mg, 0.48 mmol, 1.00 equiv), 2-bromo-6,8-dimethyl-[1,2,4]triazolo[1,5-a]pyrazine (164.5 mg, 0.72 mmol, 1.5 equiv), Pd(dppf)Cl₂.CH₂Cl₂ (19.7 mg, 0.02 mmol, 0.05 equiv) and K₂CO₃ (200.3 mg, 1.45 mmol, 3 equiv) in dioxane (2 mL) and water (0.5 mL) was stirred overnight at 100° C. under nitrogen atmosphere. The resulting mixture was diluted with water (20 mL). The resulting mixture was extracted with EtOAc (3×20 mL). The combined organic layers were washed with brine (1×20 mL), dried over anhydrous Na₂SO₄. After filtration, the filtrate was concentrated under reduced pressure. The residue was purified by silica gel column chromatography, eluted with CH₂Cl₂/MeOH (1:0) to afford tert-butyl 4-(7-{6, 8-dimethyl-[1,2,4]triazolo[1,5-a]pyrazin-2-yl}-4-oxoquinazolin-3-yl)piperidine-1-carboxylate(220.0 mg, 82.3%) as a solid. LCMS (ES, m/z): 476 [M+H]⁺.

### Synthesis of Compound 287

[chemical structure]

[0787] A mixture of tert-butyl 4-(7-{6,8-dimethyl-[1,2,4]triazolo[1,5-a]pyrazin-2-yl}-4-oxoquinazolin-3-yl)piperidine-1-carboxylate (220.0 mg, 0.46 mmol, 1.00 equiv), DCM (3 mL) and TFA (0.75 mL) was stirred for 1 h at room temperature. The resulting mixture was concentrated under vacuum to give a residue. The residue was purified by Prep-HPLC (Column: YMC-Actus Triart C18, 30*150 mm, 5 um; Mobile Phase A: Water (10 mmol/L NH₄HCO₃), Mobile Phase B: ACN; Flow rate: 60 mL/min; Gradient: 5% B to 50% B in 8 min) to afford 7-{6,8-dimethyl-[1,2,4]triazolo[1,5-a]pyrazin-2-yl}-3-(piperidin-4-yl)quinazolin-4-one (19.6 mg, 11.17%) as a solid.

### Synthesis of Compound 288

[chemical structure]

[0789] To a stirred mixture of 7-{6,8-dimethyl-[1,2,4]triazolo[1,5-a]pyrazin-2-yl}-3-(piperidin-4-yl)quinazolin-4-one (60.0 mg, 0.16 mmol, 1.00 equiv) and HCHO (48.0 mg, 1.60 mmol, 10 equiv) in DCM (3 mL) was added STAB (67.7 mg, 0.32 mmol, 2 equiv) dropwise at 0° C. The resulting mixture was stirred for 1 h at room temperature, then concentrated under vacuum to give a residue. The residue was purified by Prep-HPLC (Column: Xselect CSH OBD Column 30*150 mm Sum, n; Mobile Phase A: Water (10 mmol/L NH₄HCO₃), Mobile Phase B: ACN; Flow rate: 60 mL/min; Gradient: 5% B to 65% B in 8 min) to afford 7-{6,8-dimethyl-[1,2,4]triazolo[1,5-a]pyrazin-2-yl}-3-(1-methylpiperidin-4-yl)quinazolin-4-one (19.1 mg, 30.59%) as a solid.

[0790] Compounds 244-246, 284-288, 297-303, and 307 were prepared according to the procedures outlined herein. outlined in this Example 58 and generalized by Scheme F. The table below provides intermediates used in these procedures and final compound characterization data.

| | | LCMS | |
|---|---|---|---|
| | Coupling | (ESI, m/z) | |
| Compound No. and Structure | Reagent | [M + H]⁺ | ¹H NMR δ |
| [chemical structure] | [chemical structure] | 296 | (400 MHz, DMSO-d₆) δ 13.13 (s, 1H), 8.41 (s, 1H), 8.31 (s, 2H), 8.11 (d, J = 8.3 Hz, 1H), 7.92 (d, J = 1.6 Hz, 1H), 7.82 (dd, J = 8.3, 1.7 Hz, 1H), 4.68 (tt, J = 12.2, 3.9 Hz, 1H), 3.14-3.06 (m, 2H), 2.63 (td, J = 12.1, 2.4 Hz, 2H), 1.92 (qd, J = 12.0, 4.1 Hz, 2H), 1.82-1.73 (m, 2H) |
| [chemical structure] | [chemical structure] | 374 | (400 MHz, DMSO-d₆) δ 8.48 (d, J = 13.2 Hz, 2H), 8.23 (d, J = 8.2 Hz, 1H), 7.70 (d, J = 1.7 Hz, 1H), 7.64-7.57 (m, 2H), 7.39 (s, 1H), 4.72 (ddt, J = 12.3, 8.3, 4.0 Hz, 1H), 3.10 (d, J = 11.9 Hz, 2H), 2.62 (td, J = 12.2, 2.3 Hz, 2H), 2.33 (s, 3H), 2.25 (s, 3H), 1.93 (qd, J = 11.9, 4.0 Hz, 2H), 1.79 (t, J = 6.8 Hz, 2H) |
| [chemical structure] | [chemical structure] | 379 | (400 MHz, DMSO-d₆) δ 8.50 (s, 1H), 8.24 (d, J = 8.4 Hz, 1H), 8.10 (d, J = 1.4 Hz, 1H), 8.07 (d, J = 1.8 Hz, 1H), 7.97 (dd, J = 8.4, 1.9 Hz, 1H), 7.77 (dd, J = 11.5, 1.4 Hz, 1H), 4.70 (ddt, J = 12.2, 7.8, 4.0 Hz, 1H), 3.14-3.06 (m, 2H), 2.69 (s, 3H), 2.67-2.56 (m, 2H), 1.93 (qd, J = 12.0, 4.0 Hz, 2H), 1.83-1.75 (m, 2H). ¹⁹F NMR (376 MHz, DMSO- d6) δ −126.03 |
| [chemical structure] | [chemical structure] | 395 | (400 MHz, DMSO-d₆) δ 8.46 (s, 1H), 8.38 (d, J = 1.6 Hz, 1H), 8.23 (d, J = 8.3 Hz, 1H), 8.03 (d, J = 1.8 Hz, 1H), 7.95 (dd, J = 8.4, 1.8 Hz, 1H), 7.82 (dd, J = 12.0, 1.6 Hz, 1H), 4.70 (tt, J = 12.2, 4.0 Hz, 1H), 3.12-3.03 (m, 2H), 2.85 (s, 3H), 2.59 (td, J = 12.1, 2.5 Hz, 2H), 1.90 (qd, J = 12.1, 4.1 Hz, 2H), 1.82-1.74 (m, 2H). ¹⁹F NMR (376 MHz, DMSO) δ −122.62 |
| [chemical structure] | [chemical structure] | 375 | (400 MHz, DMSO-d₆) δ 8.71 (s, 1H), 8.46 (s, 1H), 8.28 (d, J = 1.5 Hz, 2H), 8.26-8.18 (m, 2H), 4.71 (ddt, J = 11.9, 7.6, 4.0 Hz, 1H), 3.14 (d, J = 12.5 Hz, 2H), 2.78 (s, 3H), 2.72-2.60 (m, 2H), 2.40 (s, 3H), 1.97 (qd, J = 12.1, 4.0 Hz, 2H), 1.86-1.77 (m, 2H) |
| [chemical structure] | [chemical structure] | 376 | (400 MHz, DMSO-d₆) δ 8.74 (t, J = 0.9 Hz, 1H), 8.44 (t, J = 1.1 Hz, 1H), 8.44 (s, 1H), 8.34 (d, J = 1.0 Hz, 2H), 4.71 (tt, J = 12.1, 4.0 Hz, 1H), 3.14 (dt, J = 13.0, 3.0 Hz, 2H), 2.88 (s, 3H), 2.67 (td, J = 11.7, 2.6 Hz, 2H), 2.55 (d, J = 1.0 Hz, 3H), 1.97 (qd, J = 12.0, 4.2 Hz, 2H), 1.89-1.80 (m, 2H) |
| [chemical structure] | [chemical structure] | 388 | (400 MHz, DMSO-d₆) δ 8.53 (s, 1H), 8.46 (s, 1H), 8.22 (d, J = 8.2 Hz, 1H), 7.70 (d, J = 1.7 Hz, 1H), 7.61 (d, J = 9.8 Hz, 2H), 7.39 (s, 1H), 4.62 (td, J = 11.9, 9.9, 5.8 Hz, 1H), 2.98-2.90 (m, 2H), 2.33 (s, 3H), 2.24 (d, J = 4.5 Hz, 6H), 2.17-2.01 (m, 4H), 1.85- 1.77 (m, 2H) |
| [chemical structure] | [chemical structure] | 361 | (400 MHz, DMSO-d₆) δ 9.42 (d, J = 1.5 Hz, 1H), 9.07 (d, J = 1.5 Hz, 1H), 8.47 (s, 1H), 8.32 (d, J = 1.7 Hz, 1H), 8.30- 8.18 (m, 2H), 7.93 (d, J = 1.0 Hz, 1H), 4.72 (tt, J = 12.1, 3.9 Hz, 1H), 3.17-3.10 (m, 2H), 2.67 (td, J = 12.5, 12.1, 2.5 Hz, 2H), 2.46 (s, 3H), 1.97 (qd, J = 12.1, 4.0 Hz, 2H), 1.86-1.77 (m, 2H) |
| [chemical structure] | [chemical structure] | 375 | (400 MHz, DMSO-d₆) δ 8.54 (s, 1H), 8.45 (s, 1H), 8.30- 8.23 (m, 2H), 8.19 (dd, J = 8.3, 1.6 Hz, 1H), 7.71 (d, J = 1.0 Hz, 1H), 4.73 (tt, J = 12.1, 3.9 Hz, 1H), 3.23-3.15 (m, 2H), 2.80-2.66 (m, 5H), 2.44 (d, J = 1.0 Hz, 3H), 2.02 (qd, J = 12.2, 4.0 Hz, 2H), 1.90-1.82 (m, 2H) |
| [chemical structure] | [chemical structure] | 375 | (400 MHz, DMSO-d₆) δ 9.42 (d, J = 1.5 Hz, 1H), 9.07 (d, J = 1.4 Hz, 1H), 8.52 (s, 1H), 8.32 (d, J = 1.6 Hz, 1H), 8.29- 8.18 (m, 2H), 7.93 (s, 1H), 4.61 (ddt, J = 11.7, 7.8, 3.8 Hz, 1H), 2.93 (dd, J = 9.2, 2.5 Hz, 2H), 2.46 (s, 3H), 2.23 (s, 3H), 2.12-2.00 (m, 4H), 1.86-1.77 (m, 2H) |
| [chemical structure] | [chemical structure] | 310 | (400 MHz, DMSO-d₆) δ 13.14 (s, 1H), 8.44 (s, 2H), 8.10 (d, J = 8.3 Hz, 2H), 7.91 (d, J = 1.7 Hz, 1H), 7.82 (dd, J = 8.3, 1.7 Hz, 1H), 4.57 (tt, J = 11.9, 4.0 Hz, 1H), 2.92 (dd, J = 9.0, 2.5 Hz, 2H), 2.22 (s, 3H), 2.18-1.99 (m, 4H), 1.82-1.75 (m, 2H) |
| [chemical structure] | [chemical structure] | 393 | (400 MHz, DMSO-d₆) δ 8.53 (s, 1H), 8.23 (d, J = 8.4 Hz, 1H), 8.08 (dd, J = 14.0, 1.7 Hz, 2H), 7.96 (dd, J = 8.4, 1.9 Hz, 1H), 7.76 (dd, J = 11.4, 1.5 Hz, 1H), 4.59 (td, J = 11.8, 3.9 Hz, 1H), 2.97-2.90 (m, 2H), 2.69 (s, 3H), 2.23 (s, 3H), 2.10 (ddd, J = 22.1, 11.7, 2.7 Hz, 4H), 1.81 (dd, J = 10.1, 4.0 Hz, 2H); ¹⁹F NMR (376 MHz, DMSO) δ −126.03 |
| [chemical structure] | [chemical structure] | 409 | (400 MHz, DMSO-d₆) δ 8.45 (s, 1H), 8.36 (d, J = 1.6 Hz, 1H), 8.26 (d, J = 8.3 Hz, 1H), 8.03 (d, J = 1.8 Hz, 1H), 7.94 (dd, J = 8.4, 1.9 Hz, 1H), 7.78 (dd, J = 12.1, 1.7 Hz, 1H), 4.65-4.54 (m, 1H), 2.99- 2.92 (m, 2H), 2.87 (s, 3H), 2.26 (s, 3H), 2.23-2.06 (m, 4H), 1.89-1.81 (m, 2H); ¹⁹F NMR (376 MHz, DMSO) δ −122.50 |
| [chemical structure] | [chemical structure] | 389 | (400 MHz, DMSO-d₆) δ 8.71 (s, 1H), 8.51 (s, 1H), 8.27 (d, J = 1.6 Hz, 2H), 8.26-8.16 (m, 2H), 4.65-4.54 (m, 1H), 2.93 (dd, J = 11.1, 3.4 Hz, 2H), 2.78 (s, 3H), 2.40 (d, J = 1.0 Hz, 3H), 2.23 (s, 3H), 2.20-2.01 (m, 4H), 1.85- 1.77 (m, 2H) |
| [chemical structure] | [chemical structure] | 390 | (400 MHz, DMSO-d₆) δ 8.76 (s, 1H), 8.47 (s, 1H), 8.45 (d, J = 1.4 Hz, 1H), 8.34 (s, 2H), 4.65-4.54 (m, 1H), 2.99- 2.91 (m, 2H), 2.88 (s, 3H), 2.55 (s, 3H), 2.27 (s, 3H), 2.22-2.07 (m, 4H), 1.90- 1.82 (m, 2H) |
| [chemical structure] | [chemical structure] | 389 | (400 MHz, DMSO-d₆) δ 8.44 (d, J = 8.1 Hz, 2H), 8.29- 8.23 (m, 2H), 8.16 (dd, J = 8.5, 1.6 Hz, 1H), 7.59 (d, J = 1.0 Hz, 1H), 4.64-4.53 (m, 1H), 2.95 (dd, J = 8.4, 2.6 Hz, 2H), 2.74 (s, 3H), 2.46 (d, J = 1.0 Hz, 3H), 2.26 (s, 3H), 2.23-2.06 (m, 4H), 1.89- 1.80 (m, 2H) |

### Example 59

### Synthesis of Compound 241

### Synthesis of Intermediate B122

[0791] Tert-butyl 4-(3-(2,8-dimethylimidazo[1,2-b]pyridazin-6-yl)-4-oxo-3,4-dihydroquinazolin yl)piperazine-1-carboxylate (Intermediate B 122) was prepared using the procedure described in Example 2, where in the first step (i.e. for the preparation of B16) 2-methyl-2H-indazol-5-amine is substituted with 2,8-dimethylimidazo[1,2-b]pyridazin-6-amine, and in the third step (i.e. for the preparation of 152) 1-methylpiperazine is substituted with tert-butyl piperazine-1-carboxylate. Intermediate B122 was thus obtained as a solid. LCMS (ES, m/z): 476.3 [M+H]⁺. sp Synthesis of Compound 241

[chemical structure]

[0792] To a solution of tert-butyl 4-(3-(2,8-dimethylimidazo[1,2-b]pyridazin-6-yl)-4-oxo-3,4-dihydroquinazolin-7-yl)piperazine-1-carboxylate (30 mg, 0.06 mmol) in methanol (1.0 mL) and DCM (0.5 mL) was added 4M HCl in dioxane (2.0 mL). The reaction mixture was stirred at room temperature for 1 h. The volatiles were evaporated under reduced pressure, ethyl acetate (5 mL) was added, and a precipitate formed. The suspension was centrifuged, and the supernatant decanted. The solid was washed with ethyl acetate, the suspension centrifuged, the supernatant decanted, and the solid dried. The solid was dissolved in water (1 mL), basified with NH₄OH (10%, pH 1 to pH 10). A precipitate formed, and the suspension was centrifuged, the supernatant decanted, and the solid washed with water (2×1 mL). The resulting suspension was centrifuged, the supernatant decanted, and the solid lyophilized to afford 3-(2,8-dimethylimidazo[1,2-b]pyridazin-6-yl)-7-(piperazin-1-yl)quinazolin-4(3H)-one (12 mg, 51%). LCMS (ES, m/z): 376.2 [M+H]⁺. ¹H NMR (CH₂Cl₂-d₂, 400 MHz): δ_{H} 8.26 (1H, s), 8.16 (1H, d, J=9.0 Hz), 7.77 (1H, s), 7.24 (1H, s), 7.14 (1H, dd, J=9.1, 2.6 Hz), 7.08 (1H, d, J=2.5 Hz), 3.53 (4H, t, J=5.1 Hz), 3.15 (4H, t, J=4.9 Hz), 2.69 (3H, s), 2.50 (3H, s).

### Example 60

### Synthesis of Compounds 243 and 242

### Synthesis of Intermediate B125

[chemical structure]

[0794] To a mixture of 2-amino-5-bromo-6-fluorobenzoic acid (1.00 g, 4.27 mmol) and tert-butyl 4-aminopiperidine-1-carboxylate (899 mg, 4.49 mmol) in DMF (20.0 mL) were sequentially added DIPEA (2.23 mL, 12.8 mmol) and HATU (1.95 g, 5.13 mmol). The reaction mixture was stirred 0° C. for 1 h. Ethyl acetate (100 mL) and NH₄Cl (sat) (100 mL) were added. The organic layer was separated, washed with NH₄Cl (sat) (50 mL), NaHCO₃ (sat) (50 mL), and brine (50 mL), dried over MgSO₄, filtered, and the filtrate concentrated under reduced pressure to afford tert-butyl 4-(2-amino-4-bromo-6-fluorobenzamido)piperidine-1-carboxylate (1760 mg, 99%) as a solid. LCMS (ES, m/z): 438.0, 440.0 [M+Na]⁺.

### Synthesis of Intermediate B126

[chemical structure]

[0796] To a solution of tert-butyl 4-(2-amino-4-bromo-6-fluorobenzamido)piperidine-1-carboxylate (1.70 g, 4.1 mmol) in THF (40 mL) was added triethyl orthoformate (6.05 g, 40.8 mmol) and pTSA (0.08g, 0.41 mmol). The reaction mixture was stirred at room temperature for 18 hrs. Ethyl acetate (200 mL) was added, and the organic layer was washed with NaHCO₃ (sat) (2×50 mL) and brine (50 mL), dried over MgSO₄, filtered, and the filtrate concentrated under reduced pressure to afford tert-butyl 4-(7-bromo-5-fluoro-4-oxoquinazolin-3(4H)-yl)piperidine-1-carboxylate (1.7 g, 98%) as a solid. LCMS (ES, m/z) : 425.1, 427.1 [M+H]⁺.

### Synthesis of Intermediate B127

[chemical structure]

[0798] A mixture of tert-butyl 4-(7-bromo-5-fluoro-4-oxoquinazolin-3(4H)-yl)piperidine-1-carboxylate (200 mg, 0.47 mmol), bis(pinacolato)diboron (132 mg, 0.52 mmol), PdCl₂(dppf) (34 mg, 0.05 mmol), and KOAc (140 mg, 1.4 mmol) in dioxane (3.0 mL) was heated to 100° C. under a nitrogen atmosphere for 1 h, then cooled to room temperature. A solution of 6-bromo-2,8-dimethylimidazo[1,2-b]pyridazine (106 mg, 0.47 mmol) in dioxane (5.0 mL), K₂CO₃ (259 mg, 1.9 mmol) and water (1.0 mL) were sequentially added. The reaction mixture was heated at 100 ° C. for 2 h, then cooled to room temperature. The reaction mixture was diluted with ethyl acetate (50 mL), and washed with water (25 mL) and brine (25 mL), The organic layer was separated, dried over MgSO₄, filtered, and the filtrate concentrated under reduced pressure to give a residue. The residue was purified by normal phase flash chromatography using a gradient from 10 to 50% (EtOAc/10% MeOH)/DCM to afford tert-butyl 4-(7-(2,8-dimethylimidazo[1,2-b]pyridazin-6-yl)-5-fluoro-4-oxoquinazolin-3(4H)-yl)piperidine-1-carboxylate (190 mg, 82%) as a solid. LCMS (ES, m/z): 493.2 [M+H]⁺

### Synthesis of Compound 243

[chemical structure]

[0800] To a solution of tert-butyl 4-(7-(2,8-dimethylimidazo[1,2-b]pyridazin-6-yl)-5-fluoro-4-oxoquinazolin-3(4H)-yl)piperidine-1-carboxylate (190 mg, 0.39 mmol) in methanol (2.0 mL) and DCM (1.0 mL) was added 4M HCl in dioxane (5.0 mL). The reaction mixture was stirred at room temperature for 1 h. The volatiles were evaporated under reduced pressure, ethyl acetate (5 mL) was added, and a precipitate formed. The suspension was centrifuged, the supernatant decanted, and the solid washed with ethyl acetate (2 mL). The suspension was centrifuged, the supernatant decanted, and the solid dried to yield the HCl salt of tert-butyl 44742,8-dimethylimidazo[1,2-b]pyridazin-6-yl)-5-fluoro-4-oxoquinazolin-3(4H)-yl)piperidine carboxylate. The salt was taken up in water (3 mL), basified with NH₄OH (10%, pH1 to pH 10). The aqueous layer was extracted with DCM (2×10 mL), and the combined organic layers were dried over MgSO₄, filtered, and the filtrate concentrated under reduced pressure to yield the product as a solid which was taken up in a mixture of acetonitrile and water (1:1, 10 mL), then lyophilized to afford 7-(2,8-dimethylimidazo[1,2-b]pyridazin-6-yl)-5-fluoro-3-(piperidin-4-yl)quinazolin-4(3H)-one (120 mg, 79%). LCMS (ES, m/z): 393.2 [M+H]⁺. ¹H NMR (CH₂Cl₂-d₂, 400 MHz): δ_{H} 8.21 (1H, s), 8.05 (1H, s), 7.85 (1H, d, J=12.0 Hz), 7.82 (1H, s), 7.38 (1H, s), 4.96 (1H, m), 3.40 (2H, d, J=12.5 Hz), 2.93 (2H, t, J=10.3 Hz), 2.70 (3H, s), 2.51 (3H, s), 2.06 (4H, t, J=7.7 Hz).

### Synthesis of Compound 242

[chemical structure]

[0802] A mixture of 7-(2,8-dimethylimidazo[1,2-b]pyridazin-6-yl)-5-fluoro-3-(piperidin-4-yl)quinazolin-4(3H)-one (46 mg, 0.12 mmol), and formaldehyde (37% in water, 18 mg, 0.048 mL, 0.59 mmol) in DCM (3 mL) and ethanol (1 mL) was stirred at room temperature for 1 hr. Then NaBH(OAc)₃ (149 mg, 0.70 mmol) was added, and the reaction mixture was stirred at room temperature for 1 hr. The reaction mixture was diluted with DCM (50 mL), and washed with saturated NaHCO₃ (2×50 mL) and brine (50 mL). The organic layer was dried over MgSO₄, filtered, and the filtrate concentrated under reduced pressure to give a residue. The residue was purified by normal phase chromatography using a gradient from 10 to 50% (ethyl acetate/10% MeOH)/DCM with 1% Et3N additive to afford 7-(2,8-dimethylimidazo[1,2-b]pyridazin-6-yl)-5-fluoro-3-(1-methylpiperidin-4-yl)quinazolin-4(3H)-one (3.8 mg, 8%) as a solid. LCMS (ES, m/z): 407.2 [M+H]⁺. ¹H NMR (CH₂Cl₂-d₂+CD₃OD, 400 MHz): δ_{H} 8.45 (1H, s), 8.11 (1H, s), 7.84-7.89 (2H, m), 7.53 (1H, s), 5.14 (1H, t, J=4.0 Hz), 3.67-3.72 (2H, m), 3.07-3.15 (2H, m), 2.86 (3H, s), 2.77 (2H, m), 2.73 (3H, s), 2.54 (3H, s), 2.17-2.21 (2H, m).

### Example 61

### Synthesis of Compounds 289 and 290

### Synthesis of Compound 289

[0803] Compound 289 was prepared according to the procedure described for the preparation of Compound 243 where in the first step (i.e. for preparation of Intermediate B125, Example 60) 2-amino-5-bromo-6-fluorobenzoic acid is substituted with 2-amino-5-bromo-3-fluorobenzoic acid. 7-(2,8-dimethylimidazo[1,2-b]pyridazin-6-yl)-8-fluoro-3-(piperidin-4-yl)quinazolin-4(3H)-one was thus obtained as a solid. LCMS (ES, m/z): 393.2 [M+H]⁺.

### Synthesis of Compound 290

[chemical structure]

[0805] A mixture of 7-(2,8-dimethylimidazo[1,2-b]pyridazin-6-yl)-8-fluoro-3-(piperidin-4-yl)quinazolin-4(3H)-one (36 mg, 0.09 mmol), and formaldehyde (37% in water, 14 mg, 0.037 mL, 0.46 mmol) in DCM (3 mL) and ethanol (1 mL) was stirred at room temperature for 1 hr. Then NaBH(OAc)₃ (117 mg, 0.55 mmol) was added, and the reaction mixture was stirred at room temperature for an additional 1 hr. The resulting mixture was diluted with DCM (50 mL), washed with saturated NaHCO₃ (2×50 mL) and brine (50 mL). The organic layer was dried over MgSO₄, filtered, and the filtrate concentrated under reduced pressure to give a residue. The residue was purified by normal phase chromatography using a gradient from 10 to 50% (EtOAc/10% MeOH)/DCM with 1% Et₃N additive to afford 7-(2,8-dimethylimidazo[1,2-b]pyridazin-6-yl)-8-fluoro-3-(1-methylpiperidin-4-yl)quinazolin-4(3H)-one (13 mg, 35%) as a solid. LCMS (ES, m/z): 407.2 [M+H]⁺. ¹H NMR (CH₂Cl₂-d₂ +CD₃OD, 400 MHz): δ_{H} 8.45 (1H, s), 8.11 (1H, s), 7.84-7.89 (2H, m), 7.53 (1H, s), 5.14 (1H, t, J=4.0 Hz), 3.67-3.72 (2H, m), 3.07-3.15 (2H, m), 2.86 (3H, s), 2.77 (2H, m), 2.73 (3H, s), 2.54 (3H, s), 2.17-2.21 (2H, m).

### Example 62

### Synthesis of Compound 276

### Synthesis of Intermediate B123

[chemical structure]

[0807] To a solution of 6-bromoisoquinolin-1(2H)-one (130 mg, 0.58 mmol) in DMF (5.8 mL) at 0° C. under nitrogen atmosphere was added NaH 60% (34.8 mg, 0.87 mmol). The reaction mixture was stirred at 0° C. for 1 h. To the reaction mixture was added tert-butyl 4-((methylsulfonyl)oxy)piperidine-1-carboxylate, and the resulting mixture was stirred at room temperature overnight. Ethyl acetate (50 mL) and NH₄Cl (sat) (50 ml) were added. The organic layer was separated, washed with NH₄Cl (sat) (50 ml), NaHCO₃ (sat) (50 ml) and brine (50 mL), then dried over MgSO₄, and filtered. The filtrate was concentrated under reduced pressure to give a residue. The residue was purified by normal phase chromatography, eluted with 20 to 100% ethyl acetate/hexanes to afford tert-butyl 4-(6-bromo-1-oxoisoquinolin-2(1H)-yl)piperidine-1-carboxylate (43 mg, 18%) as a solid. LCMS (ES, m/z): 428.7, 430.7 [M+Na]⁺.

### Synthesis of Intermediate B124

[chemical structure]

[0809] A suspension of tert-butyl 4-(6-bromo-1-oxoisoquinolin-2(1H)-yl)piperidine-1-carboxylate (43 mg, 0.11 mmol) and 8-fluoro-2-methyl-6-(4,4,5,5-tetramethyl-1,3,2-dioxaborolan-2-yl)imidazo[1,2-a]pyridine (32 mg, 0.12 mmol) in dioxane (1 mL) and water (0.2 mL) was degassed with argon. To the reaction mixture was added K₂CO₃ (46 mg, 0.33 mmol), followed by Pd(dppf)Cl2-DCM (10 mg, 0.012 mmol). The resulting mixture was stirred at 80° C. under an argon atmosphere for 3 h. The reaction mixture was partitioned between ethyl acetate (170 mL) and water (50 mL). The organic layer was washed with water (1×30 mL), dried over Na₂SO₄, filtered, and the filtrate concentrated in vacuo to give an oil which was purified on a silica gel chromatography, eluted with ethyl acetate/hexanes from 60 to 100% to afford tert-butyl 4-(6-(8-fluoro-2-methylimidazo[1,2-a]pyridin-6-yl)-1-oxoisoquinolin-2(1H)-yl)piperidine-1-carboxylate as a solid. LCMS (ES, m/z): 476.8 [M+H]⁺.

### Synthesis of Compound 276

[chemical structure]

[0811] To a solution of tert-butyl 4-(6-(8-fluoro-2-methylimidazo[1,2-a]pyridin-6-yl)-1-oxoisoquinolin-2(1H)-yl)piperidine-1-carboxylate (34 mg, 0.07 mmol) in methanol (1.0 mL) and DCM (0.5 mL) was added 4M HCl in dioxane (2.0 mL). The reaction mixture was stirred at room temperature for 1 h. The volatiles were evaporated under reduced pressure to yield a residue which was dissolved in water (2 mL), neutralized with 10% ammonium hydroxide (1 mL) and extracted with DCM (2×5 mL). The combined organic layers were washed with water (2×3 mL) and concentrated in vacuo to afford 6-(8-fluoro-2-methylimidazo[1,2-a]pyridin-6-yl)-2-(piperidin-4-yl)isoquinolin-1(2H)-one (16 mg, 59%). LCMS (ES, m/z): 377.2 [M+H]⁺. ¹H NMR (CH₂Cl₂-d₂, 400 MHz): δ_{H} 8.47 (1H, d, J=8.3 Hz), 8.25 (1H, d, J=1.5 Hz), 7.69 (1H, s), 7.66 (1H, dd, J=8.4, 1.8 Hz), 7.54 (1H, d, J=3.0 Hz), 7.29 (1H, d, J=7.6 Hz), 7.23 (1H, dd, J=11.7, 1.5 Hz), 6.61 (1H, d, J=7.5 Hz), 5.07-5.10 (1H, m), 3.22-3.26 (2H, m), 2.82-2.89 (2H, m), 2.48 (3H, s), 1.88-1.92 (2H, m), 1.77-1.83 (2H, m).

### Example 63

### Synthesis of Compound 291

### Synthesis of Intermediate B128

[chemical structure]

[0813] Tert-butyl 4-(7-bromo-4-oxoquinazolin-3(4H)-yl)piperidine-1-carboxylate (118 mg, 0.29 mmol), bis(pinacolato)diboron (116 mg, 0.45 mmol), PdCl₂(dppf) (30 mg, 0.040 mmol), and potassium acetate (109 mg, 1.10 mmol) were dissolved in dioxane (2.0 mL), and the solution was bubbled with argon for 10 minutes. The reaction mixture was heated at 100° C. for 1 hour, then cooled. To the reaction mixture was added 6-bromo-8-chloro-2-methylimidazo[1,2-a]pyridine (109 mg, 0.44 mmol) in dioxane (1 mL), followed by K₂CO₃ (311 mg, 2.25 mmol) in water (340 μL). The reaction mixture was heated at 100° C. for 2 hours. Upon completion, the reaction mixture was diluted with ethyl acetate (25 mL), and washed with saturated NaHCO₃ (20 mL) and brine (2×20 mL). The organic phase was then filtered under vacuum, dried over Na₂SO₄, and concentrated in vacuo to give a residue. The residue was purified by flash chromatography on a silica gel column using a gradient of 70-100% ethyl acetate in hexane. Selected fractions were combined and evaporated under reduced pressure to afford tert-butyl 4-(7-(8-chloro-2-methylimidazo[1,2-a]pyridin-6-yl)-4-oxoquinazolin-3(4H)-yl)piperidine-1-carboxylate (107 mg, 75%) as a solid. LCMS (ES, m/z): 494.2 [M+H]⁺.

### Synthesis of Compound 291

[chemical structure]

[0815] A mixture of tert-butyl 4-(7-(8-chloro-2-methylimidazo[1,2-a]pyridin-6-yl)-4-oxoquinazolin-3(4H)-yl)piperidine-1-carboxylate (84 mg, 0.17 mmol) and formic acid (5 mL) was stirred vigorously at 70° C. for 2 hours. The reaction mixture was concentrated in vacuo to give a residue. The residue was purified by flash chromatography on a C18 column using a gradient of 5-70% MeCN in water with 0.1% formic acid additive. Selected fractions were combined, concentrated under reduced pressure, neutralized with (NH₄)₂CO_{3,} and lyophilized to afford 7-(8-chloro-2-methylimidazo[1,2-c]pyridin-6-yl)-3-(piperidin-4-yl)quinazolin-4(3H)-one (59 mg, 88%) as a solid. LCMS (ES, m/z): 394.1 [M+H]⁺. ¹H NMR (DMSO-d₆, 300 MHz): δ 9.09 (1H, s), 8.48 (1H, s), 8.22 (1H, d, J=8.4 Hz), 8.03 (1H, d, J=1.8 Hz), 7.89-7.92 (2H, m), 7.84 (1H, d, J=1.1 Hz), 4.68 (1H, t,=12.7 Hz), 3.08 (2H, d,=12.3 Hz), 2.60 (2H, t,=12.0 Hz), 2.38 (3H, s), 1.84-1.97 (2H, m), 1.76 (2H, d, J=11.9 Hz).

### Example 64

### Synthesis of Compound 292

### Synthesis of Intermediate B129

[chemical structure]

[0817] Tert-butyl 4-(7-bromo-4-oxoquinazolin-3(4H)-yl)piperidine-1-carboxylate (118 mg, 0.29 mmol), bis(pinacolato)diboron (126 mg, 0.49 mmol), PdCl₂(dppf) (31 mg, 0.043 mmol), and potassium acetate (111 mg, 1.12 mmol) were dissolved in dioxane (2.0 mL). The reaction mixture was bubbled with argon for 10 minutes, heated at 100° C. for 1 hour, then cooled. To the reaction mixture was added 6-bromo-2,8-dimethylimidazo[1,2-a]pyridine (100 mg, 0.45 mmol) in dioxane (1 mL), followed by K₂CO₃ (307 mg, 2.22 mmol) in water (340 μL). The reaction mixture was heated at 100° C. for 2 hours. Upon completion, the reaction mixture was diluted with ethyl acetate (25 mL), and washed with saturated NaHCO₃ (20 mL) and brine (2×20 mL). The organic phase was then filtered under vacuum, dried over Na₂SO₄, filtered, and the filtrated concentrated in vacuo to give a residue. The residue was purified by flash chromatography on a silica gel column using a gradient of 70-100% ethyl acetate in hexanes. Selected fractions were combined and evaporated under reduced pressure to afford tert-butyl 4-(7-(2,8-dimethylimidazo[1,2-a]pyridin-6-yl)-4-oxoquinazolin-3(4H)-yl)piperidine-1-carboxylate (107 mg, 75%) as a solid. LCMS (ES, m/z): 474.3 [M+H]⁺.

### Synthesis of Compound 292

[chemical structure]

[0819] A mixture of tert-butyl 4-(7-(2,8-dimethylimidazo[1,2-a]pyridin-6-yl)-4-oxoquinazolin-3(4H)-yl)piperidine-1-carboxylate (102 mg, 0.215 mmol) and formic acid (5 mL) was stirred vigorously at 70° C. for 2 hours. The reaction mixture was concentrated in vacuo to give a residue. The residue was diluted with DCM (20 mL), and washed with 0.5 M NaOH (20 mL) and brine (20 mL). The organic phase was dried over Na₂SO₄, filtered, and the filtrate concentrated under reduced pressure to afford 7-(2,8-dimethylimidazo[1,2-a]pyridin-6-yl)-3-(piperidin-4-yl)quinazolin-4(3H)-one (39 mg, 49%) as a solid. LCMS (ES, m/z): 374.1 [M+H]⁺. ¹H NMR (DMSO-d₆, 300 MHz): δ 8.91 (1H, s), 8.47 (1H, s), 8.21 (1H, d, J=8.4 Hz), 7.97 (1H, d, J=1.8 Hz), 7.88 (1H, dd, J=8.5, 1.9 Hz), 7.70 (1H, s), 7.51 (1H, s), 4.64-4.72 (1H, m), 3.08 (2H, d, J=12.3 Hz), 2.60 (2H, t, J=12.4 Hz), 2.53 (3H, s), 2.35 (3H, s), 1.84-1.98 (2H, m), 1.76 (2H, d, J=12.0 Hz).

### Example 65

### Synthesis of Compound 293

### Synthesis of Intermediate B130

[chemical structure]

[0821] A mixture of (2R,4S)-tert-butyl 4-hydroxy-2-methylpiperidine-1-carboxylate (1.00 g, 4.41 mmol), p-toluenesulfonylchloride (1.01 g, 5.30 mmol), and 4-dimethylaminopyridine (53.9 mg, 0.441 mmol) was dissolved in DCM (44 mL) and cooled to 0° C. in an ice bath. To the reaction mixture was added triethylamine (1.8 mL, 13.2 mmol) dropwise. The mixture was warmed to room temperature and stirred for 18 hours, then concentrated under reduced pressure to give a residue. The residue was dissolved in ethyl acetate (70 mL) and washed with saturated NH₄Cl (35 mL), saturated NaHCO₃ (35 mL), and brine (35 mL). The organic phase was dried over Na₂SO₄, filtered, and the filtrate concentrated in vacuo. The residue was purified by flash chromatography on silica gel using a gradient of 0-50% ethyl acetate in hexane. Selected fractions were combined and concentrated under reduced pressure to afford tert-butyl (25,4S)-2-methyl-4-(tosyloxy)piperidine-1-carboxylate (458 mg, 28%) as a solid. LCMS (ES, m/z): 392.1 [M+Na]⁺.

### Synthesis of Intermediate B131

[chemical structure]

[0823] To a mixture of 7-bromoquinazolin-4(3H)-one (135 mg, 0.600 mmol), tert-butyl (2S,4S) methyl-4-(tosyloxy)piperidine-1-carboxylate (443 mg, 1.20 mmol), and potassium carbonate (249 mg, 1.80 mmol) was added 1,2-dimethoxyethane (DME) (3.0 mL). The resulting suspension was stirred at 100° C. for 72 hours. The reaction mixture was diluted with ethyl acetate (20 mL) and filtered through celite. The filter cake was washed with ethyl acetate (15 mL). The filtrate was concentrated under reduced pressure to give a residue and the residue was purified by flash chromatography on silica gel using a gradient of 0-50% ethyl acetate in hexane. Selected fractions were combined and concentrated in vacuo to afford tert-butyl (2R,4R)-4-(7-bromo-4-oxoquinazolin-3(4H)-yl)-2-methylpiperidine-1-carboxylate (92 mg, 36%) as a solid. LCMS (ES, m/z): 422.1 [M+H]⁺.

### Synthesis of Compound 293

[chemical structure]

[0825] A mixture of tert-butyl (2S,4R)-4-(7-bromo-4-oxoquinazolin-3(4H)-yl)-2-methylpiperidine-1-carboxylate (91 mg, 0.217 mmol), 8-fluoro-2-methyl-6-(4,4,5,5-tetramethyl-1,3,2-dioxaborolan-2-yl)imidazo[1,2-a]pyridine (70 mg, 0.253 mmol), PdCl₂(dppf) (7.9 mg, 11 μmol), and Cs₂CO₃ (71 mg, 0.217 mmol) was dissolved in a mixture of dioxane (2.8 mL) and water (280 μL). The reaction mixture was purged with argon for 10 minutes, then heated at 90° C. for 4 hours. The reaction mixture was diluted with ethyl acetate (40 mL) and washed with saturated NaHCO₃ (25 mL) and brine (2×25 mL). The organic phase was dried over Na₂SO₄, filtered, and the filtrate concentrated under reduced pressure to give a residue. The residue was purified by flash chromatography on a silica gel column using a gradient of 0-5% methanol in DCM. Selected fractions were combined and concentrated in vacuo to afford a solid. To the resulting solid was added neat formic acid (3 mL), and the reaction was stirred vigorously at 70° C. for 2 hours. The reaction mixture was concentrated under reduced pressure and the residue was purified by flash chromatography on a C18 column using a gradient of 5-30% acetonitrile in water with 0.1% formic acid additive. Selected fractions were combined, neutralized with (NH₄)₂CO_{3,} and lyophilized. The resulting solid was suspended in DCM (10 mL) and 0.2 N NaOH (10 mL), extracted, and the phases were separated. The aqueous layer was extracted with DCM (2×10 mL). The combined organic layers were dried over Na₂SO₄, filtered, and the filtrate concentrated in vacuo to afford 7-(8-fluoro-2-methylimidazo[1,2-c]pyridin-6-yl)-3-((2S,4R)-2-methylpiperidin-4-yl)quinazolin-4(3H)-one (49 mg, 64%) as a solid. LCMS (ES, m/z): 392.2 [M+H]⁺. ¹H NMR (CDCl₃, 300 MHz): δ 8.39 (1H, d,=8.3 Hz), 8.23 (1H, s), 8.21 (1H, d,=1.5 Hz), 7.86 (1H, d, J=1.8 Hz), 7.67 (1H, dd, J=8.3, 1.8 Hz), 7.50 (1H, d, J=2.8 Hz), 7.20 (1H, dd, J=11.1, 1.4 Hz), 5.23-5.31 (1H, m), 3.67 (1H, s), 3.14-3.26 (2H, m), 2.51 (3H, s), 2.16-2.24 (1H, m), 1.96-2.06 (2H, m), 1.91 (1H, d, J=13.1 Hz), 1.42 (3H, d, J=6.9 Hz).

### Example 66

### Synthesis of Compound 294

### Synthesis of Intermediate B132

[chemical structure]

[0827] A mixture of (2S,4R)-tert-butyl 4-hydroxy-2-methylpiperidine-1-carboxylate (250 mg, 1.10 mmol), p-toluenesulfonylchloride (252 mg, 1.32 mmol), and 4-dimethylaminopyridine (13 mg, 0.110 mmol) was dissolved in DCM (11 mL) and cooled to 0° C. in an ice bath. To this mixture was added triethylamine (460 μL, 3.31 mmol) dropwise. The reaction mixture was warmed to room temperature and stirred for 18 hours, then concentrated under reduced pressure to give a residue. The residue was dissolved in ethyl acetate (70 mL) and washed with saturated NH₄Cl (35 mL), saturated NaHCO₃ (35 mL), and brine (35 mL). The organic phase was dried over Na₂SO₄, filtered, and the filtrate concentrated in vacuo to give a residue. The residue was purified by flash chromatography on silica gel using a gradient of 0-50% ethyl acetate in hexanes. Selected fractions were combined and concentrated under reduced pressure to afford tert-butyl (25,4R)-2-methyl-4-(tosyloxy)piperidine-1-carboxylate (179 mg, 44%) as a solid. LCMS (ES, m/z): 392.1 [M+Na]⁺.

### Synthesis of Intermediate B133

[chemical structure]

[0829] To a mixture of 7-bromoquinazolin-4(3H)-one (80 mg, 0.355 mmol), tert-butyl (2S,4R)-2-methyl-4-(tosyloxy)piperidine-1-carboxylate (263 mg, 0.711 mmol), and potassium carbonate (149 mg, 1.07 mmol) was added 1,4-dioxane (1.5 mL). The resulting suspension was stirred under reflux for 72 hours. The reaction mixture was diluted with ethyl acetate (20 mL), and filtered through celite. The filter cake was washed with ethyl acetate (15 mL). The filtrate was concentrated under reduced pressure, and the residue purified by flash chromatography on silica gel using a gradient of 0-50% ethyl acetate in hexane. Selected fractions were combined and concentrated in vacuo to afford tert-butyl (2S,4S)-4-(7-bromo-4-oxoquinazolin-3 (4H)-yl)-2-methylpiperidine-1-carboxylate (64 mg, 43%) as a solid. LCMS (ES, m/z): 422.1 [M+H]⁺.

### Synthesis of Compound 294

[chemical structure]

[0831] A mixture of tert-butyl (2S,4S)-4-(7-bromo-4-oxoquinazolin-3(4H)-yl)-2-methylpiperidine-1-carboxylate 4 (64 mg, 0.152 mmol), 8-fluoro-2-methyl-6-(4,4,5,5-tetramethyl-1,3,2-dioxaborolan-2-yl)imidazo[1,2-a]pyridine 5 (49 mg, 0.177 mmol), PdCl₂(dppf) (6.0 mg, 7.6 μmol), and Cs₂CO₃ (148 mg, 0.455 mmol) was dissolved in dioxane (2.8 mL) and water (280 μL). The reaction mixture was purged with argon for 10 minutes, then heated at 90° C. for 4 hours. The reaction mixture was diluted with ethyl acetate (40 mL) and washed with saturated NaHCO₃ (25 mL) and brine (2×25 mL). The organic phase was filtered under vacuum, dried over Na₂SO₄, and concentrated under reduced pressure to give a residue. The residue was purified by flash chromatography on a silica gel column using a gradient of 80-100% ethyl acetate in hexane. Selected fractions were combined and evaporated in vacuo. To the resulting solid was added neat formic acid (3 mL) and the reaction mixture was stirred vigorously at 70° C. for 2 hours, then concentrated under reduced pressure to give a residue. The residue was purified by flash chromatography on a C18 column using a gradient of 5-30% MeCN in water with 0.1% formic acid additive. Selected fractions were combined, neutralized with (NH₄)₂CO_{3,} and lyophilized. The resulting solid was suspended in DCM (10 mL) and 0.2 N NaOH (10 mL), extracted, and the phases were separated. The aqueous layer was further extracted with DCM (2×10 mL). The combined organic layers were dried over Na₂SO₄, filtered, and the filtrate concentrated in vacuo to afford 7-(8-fluoro-2-methylimidazo[1,2-a]pyridin-6-yl)-3-((2S,4S)-2-methylpiperidin-4-yl)quinazolin-4(3H)-one (24 mg, 54%) as a solid. LCMS (ES, m/z): 392.2 [M+H]⁺. ¹H NMR (CDCl₃, 300 MHz): δ 8.41 (1H, d, J=8.3 Hz), 8.23 (2H, m), 7.88 (1H, d, J=1.8 Hz), 7.69 (1H, dd, J=8.3, 1.9 Hz), 7.52 (1H, d, J=3.0 Hz), 7.22 (1H, dd, J=11.1, 1.4 Hz), 4.98-5.12 (1H, m), 3.35-3.41 (1H, m), 2.93-3.04 (2H, m), 1.93-2.08 (3H, m), 1.59-1.72 (1H, m), 1.28 (3H, d, J=6.2 Hz).

### Example 67

### Synthesis of Compound 295

### Synthesis of Intermediate B134

[chemical structure]

[0833] A mixture of (2R,4S)-tert-butyl 4-hydroxy-2-methylpiperidine-1-carboxylate (1.00 g, 4.41 mmol), p-toluenesulfonylchloride (1.01 g, 5.30 mmol), and 4-dimethylaminopyridine (53.9 mg, 0.441 mmol) was dissolved in DCM (44 mL) and cooled to 0° C. in an ice bath. To this mixture was added triethylamine (1.8 mL, 13.2 mmol) dropwise. The reaction mixture was warmed to room temperature and stirred for 18 hours, then concentrated under reduced pressure to give a residue. The residue was dissolved in ethyl acetate (70 mL) and washed with saturated NH₄Cl (35 mL), saturated NaHCO₃ (35 mL), and brine (35 mL). The organic phase was dried over Na₂SO₄, filtered, and the filtrate concentrated in vacuo to give a residue. The residue was purified by flash chromatography on silica gel using a gradient of 0-50% ethyl acetate in hexane. Selected fractions were combined and concentrated under reduced pressure to afford tert-butyl (2R,4S)-2-methyl (tosyloxy)piperidine-1-carboxylate (1.14 g, 70%) as a solid. LCMS (ES, m/z): 392.2 [M+Na]⁺.

### Synthesis of Intermediate B135

[chemical structure]

[0835] To a mixture of 7-bromoquinazolin-4(3H)-one (320 mg, 1.42 mmol), tert-butyl (2R,4S)-2-methyl-4-(tosyloxy)piperidine-1-carboxylate (1.05 g, 2.84 mmol), and potassium carbonate (590 mg, 4.27 mmol) was added 1,2-dimethoxyethane (DME) (7.11 mL). The resulting suspension was stirred at 100° C. for 72 hours, then diluted with ethyl acetate (20 mL) and filtered through celite. The filter cake was washed with ethyl acetate (15 mL). The filtrate was concentrated under reduced pressure to give a residue and the residue was purified by flash chromatography on silica gel using a gradient of 0-50% ethyl acetate in hexane. Selected fractions were combined and concentrated in vacuo to afford tert-butyl (2R,4R)-4-(7-bromo-4-oxoquinazolin-3(4H)-yl)-2-methylpiperidine-1-carboxylate (349 mg, 58%) as a solid. LCMS (ES, m/z): 422.1 [M+H]⁺.

### Synthesis of Compound 295

[chemical structure]

[0837] A mixture of tert-butyl (2R,4R)-4-(7-bromo-4-oxoquinazolin-3(4H)-yl)-2-methylpiperidine-1-carboxylate (120 mg, 0.284 mmol), 8-fluoro-2-methyl-6-(4,4,5,5-tetramethyl-1,3,2-dioxaborolan-2-yl)imidazo[1,2-a]pyridine (92 mg, 0.33 mmol), PdCl₂(dppf) (21 mg, 0.028 mmol), and Cs₂CO₃ (278 mg, 0.852 mmol) was dissolved in dioxane (3.4 mL) and water (340 μL). The reaction mixture was bubbled with argon for 10 minutes, then heated at 90° C. for 4 hours. The reaction mixture was diluted with ethyl acetate (40 mL) and washed with saturated NaHCO₃ (25 mL) and brine (2×25 mL). The organic phase was dried over Na₂SO₄, filtered, and the filtrate concentrated under reduced pressure to give a residue. The residue was purified by flash chromatography on a silica gel column using a gradient of 80-100% ethyl acetate in hexanes. Selected fractions were combined and evaporated in vacuo to afford a solid. To the resulting solid was added neat formic acid (5 mL) and stirred vigorously at 70° C. for 2 hours. The reaction mixture was concentrated under reduced pressure to give a residue and the residue was purified by flash chromatography on a C18 column using a gradient of 5-30% MeCN in water with 0.1% formic acid additive. Selected fractions were combined, neutralized with (NH₄)₂CO_{3,} and lyophilized. The resulting solid was suspended in DCM (10 mL) and 0.2 N NaOH (10 mL), extracted, and the phases were separated. The aqueous layer was extracted with DCM (2×10 mL). The combined organic layers were dried over Na₂SO₄, filtered, and the filtrate concentrated in vacuo to afford 7-(8-fluoro-2-methylimidazo[1,2-c]pyridin-6-yl)-3-((2R,4R)-2-methylpiperidin-4-yl)quinazolin-4(3H)-one (25 mg, 22%) as a solid. LCMS (ES, m/z): 392.2 [M+H]⁺. ¹H NMR (CDCl₃, 300 MHz): δ 8.41 (1H, d, J=8.3 Hz), 8.23 (1H, d, J=1.5 Hz), 8.22 (1H, s), 7.88 (1H, d, J=1.8 Hz), 7.69 (1H, dd, J=8.3, 1.9 Hz), 7.52 (1H, dd, J=3.0, 1.0 Hz), 7.22 (1H, dd, J=11.1, 1.5 Hz), 4.96-5.07 (1H, m), 3.35 (1H, d, J=12.6 Hz), 2.92-3.01 (2H, m), 2.54 (3H, s), 2.05 (2H, d, J=13.4 Hz), 1.85-1.99 (1H, m), 1.54-1.66 (1H, m), 1.25 (3H, d, J=6.3 Hz).

### Example 68

### Synthesis of Compound 296

### Synthesis of Intermediate B136

[chemical structure]

[0839] A mixture of (2R,4R)-tert-butyl 4-hydroxy-2-methylpiperidine-1-carboxylate (1.00 g, 4.41 mmol), p-toluenesulfonylchloride (1.01 g, 5.30 mmol), and 4-dimethylaminopyridine (53.9 mg, 0.441 mmol) was dissolved in DCM (44 mL), then cooled to 0° C. in an ice bath. To this mixture was added triethylamine (1.8 mL, 13.2 mmol) dropwise. The reaction mixture was warmed to room temperature and stirred for 18 hours, then concentrated under reduced pressure to give a residue. The residue was dissolved in ethyl acetate (70 mL) and washed with saturated NH₄Cl (35 mL), saturated NaHCO₃ (35 mL), and brine (35 mL). The organic phase was dried over Na₂SO₄, filtered, and the filtrate concentrated in vacuo to give a residue. The residue was purified by flash chromatography on silica gel using a gradient of 0-50% ethyl acetate in hexane. Selected fractions were combined and concentrated under reduced pressure to afford tert-butyl (2R,4R)-2-methyl (tosyloxy)piperidine-1-carboxylate (322 mg, 20%) as a solid. LCMS (ES, m/z): 392.1 [M+Na]⁺.

### Synthesis of Intermediate B137

[chemical structure]

[0841] To a mixture of 7-bromoquinazolin-4(3H)-one (98 mg, 0.436 mmol), tert-butyl (2S,4S)-2-methyl-4-(tosyloxy)piperidine-1-carboxylate (322 mg, 0.872 mmol), and potassium carbonate (181 mg, 1.31 mmol) was added 1,2-dimethoxyethane (DME) (2.2 mL). The resulting suspension was stirred at 100° C. for 72 hours, then diluted with ethyl acetate (20 mL) and filtered through celite. The filter cake was washed with ethyl acetate (15 mL). The filtrate was concentrated under reduced pressure to give a residue, and the residue was purified by flash chromatography on silica gel using a gradient of 0-50% ethyl acetate in hexane. Selected fractions were combined and concentrated in vacuo to afford tert-butyl (2R,4S)-4-(7-bromo-4-oxoquinazolin-3(4H)-yl)-2-methylpiperidine-1-carboxylate (105 mg, 57%) as a solid. LCMS (ES, m/z): 422.1 [M+H]⁺.

### Synthesis of Compound 296

[chemical structure]

[0843] A mixture of tert-butyl (25,4R)-4-(7-bromo-4-oxoquinazolin-3(4H)-yl)-2-methylpiperidine-1-carboxylate (76 mg, 0.181 mmol), 8-fluoro-2-methyl-6-(4,4,5,5-tetramethyl-1,3,2-dioxaborolan-2-yl)imidazo[1,2-a]pyridine (58 mg, 0.212 mmol), PdCl₂(dppf) (6.6 mg, 9.0 μmol), and Cs₂CO₃ (177 mg, 0.543 mmol) was dissolved in dioxane (2.8 mL) and water (280 μL). The reaction mixture was purged with argon for 10 minutes, then heated at 90° C. for 4 hours. The reaction mixture was diluted with ethyl acetate (40 mL) and washed with saturated NaHCO₃ (25 mL) and brine (2×25 mL). The organic phase was dried over Na₂SO₄, filtered, and the filtrate concentrated under reduced pressure to give a residue. The residue was purified by flash chromatography on a silica gel column using a gradient of 0-10% methanol in DCM. Selected fractions were combined and evaporated in vacuo to yield a solid. To the resulting solid was added neat formic acid (3 mL) and the reaction mixture was stirred vigorously at 70° C. for 2 hours, then concentrated under reduced pressure to give a residue. The residue was purified by flash chromatography on a C18 column using a gradient of 5-30% acetonitrile in water with 0.1% formic acid additive. Selected fractions were combined, neutralized with (NH₄)₂CO_{3,} and lyophilized. The resulting solid was suspended in DCM (10 mL) and 0.2 N NaOH (10 mL), extracted, and the phases were separated. The aqueous layer was extracted with DCM (2×10 mL). The combined organic layers were dried over Na₂SO₄, filtered, and the filtrate concentrated in vacuo to afford 7-(8-fluoro-2-methylimidazo[1,2-a]pyridin-6-yl)-3-((2R,4S)-2-methylpiperidin-4-yl)quinazolin-4(3H)-one (26 mg, 36%) as a solid. LCMS (ES, m/z): 392.1 [M+H]⁺. ¹H NMR (CDCl₃, 300 MHz): δ 8.39 (1H, d, J=8.3 Hz), 8.23 (1H, s), 8.20 (1H, d, J=1.4 Hz), 7.85 (1H, d, J=1.8 Hz), 7.67 (1H, dd, J=8.3, 1.8 Hz), 7.50 (1H, d, J=2.9 Hz), 7.20 (1H, dd, J=11.1, 1.4 Hz), 5.21-5.29 (1H, m), 3.55-3.58 (1H, m), 3.15-3.22 (1H, m), 3.05 (1H, dt, J=12.8, 3.8 Hz), 2.51 (3H, s), 2.03-2.13 (2H, m), 1.86-1.93 (2H, m), 1.36 (3H, d, J=6.9 Hz).

### Example 69

### Synthesis of Compounds 304 and 305

### Synthesis of Intermediate B138

[chemical structure]

[0845] A mixture of 6-{2,8-dimethylimidazo[1,2-b]pyridazin-6-yl}-2H-phthalazin-1-one (80.0 mg, 0.27 mmol, 1.00 equiv), tert-butyl 2-ethyl-4-[(4-methylbenzenesulfonyl)oxy]piperidine-1-carboxyl ate (157.9 mg, 0.41 mmol, 1.5 equiv) and Cs₂CO₃ (268.4 mg, 0.82 mmol, 3 equiv) in DMF (1.6 mL) was stirred overnight at 100° C. The resulting mixture was diluted with water (10 mL), then extracted with ethyl acetate (3×10 mL). The combined organic layers were washed with brine (3×10 mL), dried over anhydrous Na₂SO₄, and filtered. After filtration, the filtrate was concentrated under reduced pressure to give a residue. The residue was purified by silica gel column chromatography, eluted with PE/EA (0:1) to afford tert-butyl 446-{2,8-dimethylimidazo[1,2-b]pyridazin-6-yl}-1-oxophthalazin-2-yl)-2-ethylpiperidine-1-carboxylate (65 mg, 47.09%) as a solid. LCMS (ES, m/z): 503 [M+H]⁺.

### Synthesis of Compounds 304 and 305

[chemical structure]

[0847] A mixture of tert-butyl 4-(6-{2,8-dimethylimidazo[1,2-b]pyridazin-6-yl}-1-oxophthalazin-2-yl)-2-ethylpiperidine-1-carboxylate (65 mg, 0.13 mmol, 1.00 equiv), TFA (0.5 mL) and DCM (2 mL) was stirred for 1 h at room temperature. The resulting mixture was concentrated under vacuum to give a residue. The residue was purified by CHIRAL-HPLC (Column: CHIRALPAK IG, 2*25 cm, 5 um; Mobile Phase A: MtBE (0.1% DEA)-HPLC, Mobile Phase B: EtOH; Flow rate: 20 mL/min; Gradient: 25% B to 25% B in 13 min) to afford 6-{2,8-dimethylimidazo[1,2-b]pyridazin-6-yl}-2-[(2R,4R)-2-ethylpiperidin-4-yl]phthalazin-1-one (5.2 mg, 9.95%) and 6-{2,8-dimethylimidazo[1,2-b]pyridazin-6-yl}-2-[(2R,4S)-2-ethylpiperidin-4-yl]phthalazin-1-one (1.6 mg, 2.96%) as solids. Compound 304: LCMS (ES, m/z): 403 [M+H]⁺. ¹H NMR (400 MHz, DMSO-d₆) δ 8.62 — 8.55 (m, 2H), 8.48 (dd, J=8.4, 1.7 Hz, 1H), 8.38 (d, J=8.4 Hz, 1H), 8.11 (s, 1H), 7.78 (s, 1H), 4.98 (tt, J=11.8, 4.1 Hz, 1H), 3.10 (dt, J=12.4, 3.3 Hz, 1H), 2.74-2.63 (m, 1H), 2.64 (s, 3H), 2.50 (s, 1H)_{2.43} (s, 3H), 1.90 — 1.67 (m, 3H), 1.51 (q, J=11.7 Hz, 1H), 1.38 (ddp, J=20.8, 14.0, 6.9 Hz, 2H), 0.89 (t, J=7.4 Hz, 3H). Compound 305: LCMS (ES, m/z): 403 [M+H]⁺. ¹H NMR (400 MHz, DMSO-d₆) δ 8.63 (d, J=12.0 Hz, 2H), 8.51 (dd, J=8.5, 1.7 Hz, 1H), 8.40 (d, J=8.4 Hz, 1H), 8.13 (s, 1H), 7.80 (s, 1H), 5.25 (tt, J=8.3, 4.4 Hz, 1H), 3.30 (s, 2H), 3.26 (s, 1H), 2.65 (s, 3H), 2.44 (s, 3H), 2.19 (dtd, J=18.0, 8.4, 3.7 Hz, 2H), 2.05-1.96 (m, 1H), 1.91 (dt, J=13.7, 5.3 Hz, 1H), 1.72 (p, J=7.9, 7.4 Hz, 2H), 0.96 (t, J=7.4 Hz, 3H).

### Example 70

### Synthesis of Compound 309

### Synthesis of Intermediate B139

[chemical structure]

[0849] A mixture of 6-bromo-2,8-dimethylimidazo[1,2-b]pyridazine (188 mg, 0.83 mmol), Bis(pinacolato)diboron (211 mg, 0.83 mmol), Pd(dppf)Cl₂ (47 mg, 0.06 mmol), and potassium acetate (188 mg, 1.92 mmol) in dioxane (4.3 mL) was heated to 100° C. for 1.5 h. To the reaction mixture was added a solution of tert-butyl 4-(6-bromo-1-oxoisoquinolin-2(1H)-yl)piperidine-1-carboxylate (260 mg, 0.64 mmol) in dioxane (3.5 mL), followed by cesium carbonate (624 mg, 1.92 mmol) and water (0.9 mL) under argon. This resulting mixture was heated at 90° C. for 2 h, cooled to room temperature and filtered through celite using 20% methanol in DCM as eluent. The volatiles were evaporated under reduced pressure. Water (20 mL) and DCM (20 mL) were added, and the layers were separated. The aqueous layer was extracted with DCM (3×20 mL). The organic layers were combined, dried over Na₂SO₄, filtered, and the filtrate concentrated under reduced pressure to give a residue. The residue was purified by flash chromatography on silica gel using a gradient of 0-10% methanol in DCM to afford tert-butyl 4-(6-(2,8-dimethylimidazo[1,2-b]pyridazin-6-yl)-1-oxoisoquinolin-2(1H)-yl)piperidine-1-carboxylate (267 mg, 88%) as a solid. LCMS (ES, m/z): 474.2 [M+H]⁺.

### Synthesis of Compound 309

[chemical structure]

[0851] To a solution of tert-butyl 4-(6-(2,8-dimethylimidazo[1,2-b]pyridazin-6-yl)-1-oxoisoquinolin-2(1H)-yl)piperidine-1-carboxylate (267 mg, 564 umol) in dioxane (11.3 mL) was added 4.0 M HCl in dioxane (11.3 mL, 45.1 mmol). The resulting mixture was stirred at room temperature for 1 hour. The reaction mixture was concentrated in vacuo, taken up in CH₂Cl₂ (30 mL), and washed with saturated NaHCO₃ (15 mL). The aqueous phase was extracted with DCM (2×20 mL). The organic layers were combined, dried over Na₂SO₄, filtered, and the filtrate concentrated in vacuo to give a residue. The residue was purified on a silica gel cartridge using a gradient of MeOH/NH₄OH (9:1) from 0-20% in CH₂Cl₂ to afford 6-(2,8-dimethylimidazo[1,2-b]pyridazin-6-yl)-2-(piperidin-4-yl)isoquinolin-1(2H)-one (167 mg, 79%) as a solid. LCMS (ES, m/z): 374.1 [M+H]⁺. ¹H NMR (CHCl₃-d, 400 MHz): δ_{H} 8.55 (1H, d, J=8.4 Hz), 8.06-8.03 (2H, m), 7.80 (1H, s), 7.34 (1H, s), 7.24 (1H, s), 6.64 (1H, d, J=7.5 Hz), 5.12-5.18 (1H, m), 3.25 (2H, d, J=12.2 Hz), 2.88 (2H, t, J=11.9 Hz), 2.74 (3H, s), 2.55 (3H, s), 1.95 (2H, d, J=11.9 Hz), 1.83-1.74 (2H, m).

### Example 71

### Synthesis of Compound 310

### Synthesis of Compound 310

[chemical structure]

[0853] To a solution of 6-(2,8-dimethylimidazo[1,2-b]pyridazin-6-yl)-2-(piperidin-4-yl)isoquinolin-1(2H)-one (90.0 mg, 229 umol), CH₂Cl₂ (1.0 mL) in ethanol (0.2 mL) was added a solution of formaldehyde 37% in water (85.2 uL, 1.14 mmol). The mixture was stirred at room temperature for 1 hour. Then NaBH(OAc)₃ (291 mg, 1.37 mmol) was added and reaction mixture was stirred for an additional 2 hours at room temperature. The reaction mixture was concentrated under reduced pressure, then diluted with CH₂Cl₂ (30 mL) and washed with saturated aqueous NaHCO₃ (10 mL). The organic layer was dried over Na₂SO₄ and the solvent was removed in vacuo to give a residue. The residue was purified by flash chromatography on a silica gel column using a gradient of 0 to 20% methanol in CH₂Cl₂ to afford 6-(2,8-dimethylimidazo[1,2-b]pyridazin-6-yl)-2-(1-methylpiperidin-4-yl)isoquinolin-1(2H)-one (63.0 mg, 71%) as a solid. LCMS (ES, m/z): 388.2 [M+H]⁺. ¹H NMR (CHCl₃-d, 400 MHz): δ_{H} 8.55 (1H, d, J=8.3 Hz), 8.04 (2H, d, J=10.9 Hz), 7.80 (1H, s), 7.33 (1H, s), 7.23 (1H, d, J=7.6 Hz), 6.64 (1H, d, J=7.5 Hz), 5.07 (1H, p, J=8.1 Hz), 3.02 (2H, d, J=11.4 Hz), 2.74 (3H, s), 2.55 (3H, s), 2.36 (3H, s), 2.24 (2H, t, J=8.7 Hz), 1.94 (4H, s).

### Example 72

### Synthesis of Compound 311

### Synthesis of Intermediate B140

[chemical structure]

[0855] A mixture of 7-bromopyrido[3,2-d]pyrimidin-4(3H)-one (0.25 g, 1.1 mmol), tert-butyl 4-(tosyloxy)piperidine-1-carboxylate (1.2 g, 3.3 mmol), and K₂CO₃ (0.31 g, 2.2 mmol) in DME (8.0 mL) was heated to 85° C. for 72 h and then cooled to room temperature. The reaction mixture was filtered, and the volatiles were evaporated under reduced pressure. Water (20 mL) and DCM (20 mL) were added, and the layers were separated. The aqueous layer was extracted with DCM (3×20 mL). The organic layers were combined, dried over Na₂SO₄, filtered, and the filtrate concentrated under reduced pressure to give a residue. The residue was purified by column chromatography on silica gel using a gradient of 0-100% ethyl acetate in hexane to afford tert-butyl 4-(7-bromo-4-oxopyrido[3,2-d]pyrimidin-3(4H) yl)piperidine-1-carboxylate (0.11 g, 24%) as a solid. LCMS (ES, m/z): 431.1 [M+Na]⁺.

### Synthesis of Intermediate B141

[chemical structure]

[0857] A mixture of tert-butyl 4-(7-bromo-4-oxopyrido[3,2-d]pyrimidin-3(4H) yl)piperidine-1-carboxylate (108 mg, 0.26 mmol), 2,7-dimethyl-5-(4,4,5,5-tetramethyl-1,3,2-dioxaborolan-2-yl)-2H-indazole (108 mg, 0.396 mmol), Cs₂CO₃ (215 mg, 0.66 mmol), and Pd(dppf)Cl₂.DCM (22 mg, 0.0264 mmol) in a mixture of dioxane (4.0 mL) and water (0.5 mL) was heated to 90° C. for 1.5 h and then cooled to room temperature. The reaction mixture was filtered over Celite using 10% methanol in DCM as eluent. The volatiles were evaporated under reduced pressure. The crude material was purified by column chromatography on silica gel using a gradient of 0-10% methanol in ethyl acetate to afford tert-butyl 4-(7-(2,7-dimethyl-2H-indazol-5-yl)-4-oxopyrido[3,2-d]pyrimidin-3(4H)-yl)piperidine-1-carboxylate (101 mg, 81%) as a solid. LCMS (ES, m/z): 475.2 [M+H]⁺.

### Synthesis of Compound 311

[chemical structure]

[0859] To a solution of tert-butyl 4-(7-(2,7-dimethyl-2H-indazol-5-yl)-4-oxopyrido[3,2-d]pyrimidin-3(4H)-yl)piperidine-1-carboxylate (101 mg, 0.21 mmol) in methanol (8.0 mL) was added 4 M HCl solution in dioxane (7.0 mL, 28 mmol). The reaction mixture was stirred at room temperature for 2 h. The volatiles were evaporated under reduced pressure. An aqueous solution of NaHCO₃ (20 mL) and DCM (30 mL) were added, and the layers were separated. The aqueous layer was extracted with DCM (3×30 mL). The organic layers were combined, dried over sodium sulfate, filtered, and the filtrate concentrated under reduced pressure to give a residue. The residue was purified by column chromatography on silica gel using a gradient of 0-20% MeOH:Et3N (2:1 ratio) in DCM. The fractions containing product were collected and evaporated under reduced pressure. Water (10 mL) and DCM (10 mL) were added, and the layers were separated. The aqueous layer was extracted with DCM (3×10 mL). The organic layers were combined, dried over sodium sulfate, filtered, and the filtrate concentrated under reduced pressure to afford 7-(2,7-dimethyl-2H-indazol-5-yl)-3-(piperidin-4-yl)pyrido[3,2-d]pyrimidin-4(3H)-one (48 mg, 60%) as a solid. LCMS (ES, m/z): 375.2 [M+H]⁺. ¹H NMR (DMSO-d₆, 400 MHz): δ_{H} 9.20 (1H, d, J=2.2 Hz), 8.53 (1H, s), 8.46 (1H, s), 8.31 (1H, d, J=2.2 Hz), 8.12 (1H, s), 7.56 (1H, s), 4.72 (1H, t, J=11.8 Hz), 4.22 (3H, s), 3.10 (2H, d, J=12.2 Hz), 2.60-2.66 (5H, m), 1.80-1.98 (4H, m).

### Example 73

### Synthesis of Compound 312

### Synthesis of Intermediate B142

[chemical structure]

[0861] A methyl 4-bromo-2-fluoro-6-methylbenzoate (1.00 g, 3.97 mmol) andN-bromosuccinimide (1.57 g, 8.73 mmol) was dissolved in CCl₄ (26 mL). To the reaction mixture was added benzoyl peroxide (64.1 mg, 0.198 mmol). The reaction mixture was heated under reflux overnight, then cooled to room temperature and diluted with DCM (100 mL). The organic phase was washed with 1 M Na₂S₂O₃ (50 mL), saturated NaHCO₃ (50 mL), and brine (2×50 mL). The organic phase was dried over Na₂SO₄, filtered, and the filtrate concentrated under reduced pressure. The residue was purified by flash chromatography on silica gel using a gradient of 0-20% ethyl acetate in hexane to afford methyl 4-bromo-2-(dibromomethyl)-6-fluorobenzoate (860 mg, 54%) as an oil. LCMS (ES, m/z): 404.7 [M+H]⁺.

### Synthesis of Intermediate B143

[chemical structure]

[0863] To a solution of methyl 4-bromo-2-(dibromomethyl)-6-fluorobenzoate (360 mg, 0.889 mmol) in isopropanol (7.1 mL) and water (1.8 mL) was added silver nitrate (453 mg, 2.67 mmol). The resulting suspension was stirred at 50° C. overnight in the dark. The reaction mixture was filtered through celite, using ethyl acetate as eluent. The filtrate was concentrated to dryness in vacuo to afford a 1:1 mixture of the ester and carboxylic acid of methyl 4-bromo-2-fluoro-6-formylbenzoate (194 mg, 84%) which was used as prepared. LCMS (ES, m/z): 260.9 [M+H]⁺ (ester), 246.9 [M+H]⁺ (acid).

### Synthesis of Intermediate B144

[chemical structure]

[0865] To 6-bromo-8-fluorophthalazin-1(2H)-one (194 mg, 0.743 mmol) was added acetonitrile (5 mL), followed by hydrazine monohydrate (48.4 mg, 0.966 mmol). The reaction mixture was stirred at room temperature for 5 minutes and a precipitate formed. The precipitate was collected by vacuum filtration and the solid was washed with cold acetonitrile (10 mL), then dried under high vacuum for 1 hour. The resulting solid was dissolved in ethanol (5 mL), and to the solution was added p-toluenesulfonic acid (7.1 mg, 0.037 mmol). The reaction mixture was heated under reflux for 72 hours, then diluted with ethyl acetate (50 mL) and washed with saturated NaHCO₃ (30 mL), and brine (2×50 mL). The organic phase was dried over Na₂SO_{4,} filtered, and the filtrate concentrated in vacuo to afford 6-bromo-8-fluorophthalazin-1(2H)-one (210 mg, 97%) as a solid. LCMS (ES, m/z): 242.9 [M+H]⁺.

### Synthesis of Intermediate B145

[chemical structure]

[0867] To a mixture of 6-bromo-8-fluorophthalazin-1(2H)-one (210 mg, 0.864 mmol) and tert-butyl 7-(tosyloxy)-4-azaspiro[2.5]octane-4-carboxylate (659 mg, 1.73 mmol) was added DMSO (4.3 mL), followed by K₂CO₃ (512 g, 3.70 mmol). The reaction mixture was heated at 80° C. for 48 hours, then diluted with ethyl acetate (75 mL) and washed with saturated NH₄Cl (50 mL), NaHCO₃ (50 mL), and brine (2×50 mL). The organic phase was dried over Na₂SO₄ and concentrated in vacuo to give a residue. The residue was purified by flash chromatography on silica gel using a gradient of 10-100% ethyl acetate in hexane to afford tert-butyl 7-(6-bromo-8-fluoro-1-oxophthalazin-2(1H)-yl)-4-azaspiro[2.5]octane-4-carboxylate (34 mg, 9%) as a solid. LCMS (ES, m/z): 474.1 [M+Na]⁺.

### Synthesis of Intermediate B146

[chemical structure]

[0869] A mixture of 6-bromo-2,8-dimethylimidazo[1,2-b]pyridazine (43 mg, 0.19 mmol), bis(pinacolato)diboron (50 mg, 0.19 mmol), PdCl₂(dppf) (11 mg, 0.015 mmol), and potassium acetate (45 mg, 0.45 mmol) was dissolved in dioxane (750 μL) and argon was bubbled through the resulting mixture for 10 minutes. The reaction mixture was heated at 100° C. for 1 hour, then cooled. To the reaction mixture was added tert-butyl 7-(6-bromo-8-fluoro-1-oxophthalazin-2(1H)-yl)-4-azaspiro[2.5]octane-4-carboxylate (34 mg, 0.075 mmol) in dioxane (0.6 μL), followed by Cs₂CO₃ (225 mg, 0.690 mmol) in water (200 μL). The reaction mixture was heated at 100° C. for 2 hours, then diluted with ethyl acetate (25 mL) and washed with saturated NaHCO₃ (20 mL) and brine (2×20 mL). The organic phase was then filtered under vacuum, dried over Na₂SO₄, filtered, and the filtrate concentrated in vacuo to give a residue. The residue was purified by flash chromatography on a C18 column using a gradient of 50-100% acetonitrile in water to afford tert-butyl 7-(6-(2, 8-dimethylimidazo[1,2-b]pyridazin-6-yl)-8-fluoro-1-oxophthalazin-2(1H)-yl)-4-azaspiro[2.5]octane-4-carboxylate (13 mg, 33%) as a solid. LCMS (ES, m/z): 519.3 [M+H]⁺

### Synthesis of Compound 312

[chemical structure]

[0871] To tert-butyl 7-(6-(2,8-dimethylimidazo[1,2-b]pyridazin-6-yl)-8-fluoro-1-oxophthalazin-2(1H)-yl)-4-azaspiro[2.5]octane-4-carboxylate (13 mg, 25 μmol) was added HCl 4.0 M in dioxane (1.5 mL). The reaction mixture was stirred vigorously at room temperature for 2 hours, then concentrated under reduced pressure to give a residue. The residue was partitioned between DCM (20 mL) and 0.25 M NaOH (20 mL) and stirred to neutralize. The phases were separated, and the aqueous phase was extracted with DCM (2×20 mL). The organic phases were combined, washed with brine (30 mL), dried over Na₂SO₄, filtered, and the filtrate concentrated in vacuo to afford 6-(2,8-dimethylimidazo[1,2-b]pyridazin-6-yl)-8-fluoro-2-(4-azaspiro[2.5]octan-7-yl)phthalazin-1(2H)-one (10 mg, 95%) as a a solid. LCMS (ES, m/z): 419.2 [M+H]⁺. ¹H NMR (CDCl₃, 300 MHz): δ 8.26 (1H, d, J=2.5 Hz), 8.06 (2H, s), 7.83 (1H, s), 7.34 (1H, s), 5.37 (1H, m), 3.67-3.79 (1H, m), 3.24 (1H, d,=12.9 Hz), 3.02 (1H, m), 2.78 (3H, s), 2.58 (3H, s), 2.40 (1H, t,=12.2 Hz), 1.98 (2H, m), 0.74 (2H, m), 0.56 (2H, m).

### Example 74

### Synthesis of Compound 313

### Synthesis of Intermediate B147

[chemical structure]

[0873] To a solution of 7-bromo-2-methylquinazolin-4(3H)-one (300 mg, 1.19 mmol) in DME (5.8 mL) at 0° C. under nitrogen atmosphere was added Cs₂CO₃ (1.17 g, 3.58 mmol) and tert-butyl 4-((methylsulfonyl)oxy)piperidine-1-carboxylate. The reaction mixture was stirred at 85° C. for 18 h. Ethyl acetate (100 mL) and NH₄Cl (sat) (50 ml) were added. The organic layer was separated, washed with NH₄Cl (sat) (50 ml), NaHCO₃ (sat) (50 ml) and brine (50 mL), dried over MgSO₄, filtered, and the filtrate concentrated under reduced pressure to give a residue. The residue was purified by normal phase chromatography eluting from 20 to 100% ethyl acetate/hexane to afford tert-butyl 4-(7-bromo-2-methyl-4-oxoquinazolin-3(4H)-yl)piperidine-1-carboxylate (91 mg, 18%) as a solid. LCMS (ES, m/z): 422.1, 424.1 [M+H]⁺.

### Synthesis of Intermediate B148

[chemical structure]

[0875] A suspension of the tert-butyl 4-(7-bromo-2-methyl-4-oxoquinazolin-3(4H)-yl)piperidine carboxylate (90 mg, 0.21 mmol) and 2,7-dimethyl-5-(4,4,5,5-tetramethyl-1,3,2-dioxaborolan yl)-2H-indazole (70 mg, 0.26 mmol) in dioxane (2 mL) and water (0.5 mL) was degassed with argon. Then K₂CO₃ (88 mg, 0.64 mmol) was added to the reaction mixture, followed by Pd(dppf)Cl₂-DCM (15 mg, 0.021 mmol). The resulting solution was stirred at 100° C. under an argon atmosphere for 2 h. The reaction mixture was purified using a C18 cartridge eluted with acetonitrile/water (0.1% HCl) from 20 to 80% to give tert-butyl 4-(7-(2,7-dimethyl-2H-indazol-5-yl)-2-methyl-4-oxoquinazolin-3(4H)-yl)piperidine-1-carboxylate (100 mg, 96%) as a solid. LCMS (ES, m/z): 488.3 [M+H]⁺.

### Synthesis of Compound 313

[chemical structure]

[0877] To a solution of tert-butyl 4-(7-(2,7-dimethyl-2H-indazol-5-yl)-2-methyl-4-oxoquinazolin-3(4H)-yl)piperidine-1-carboxylate (100 mg, 0.21 mmol) in methanol (1.0 mL) and DCM (0.5 mL) was added 4M HCl in dioxane (2.0 mL). The reaction mixture was stirred at room temperature for 1 h and a precipitate formed. The precipitate was collected, washed with EtOAc (2.0 mL×2), then dissolved in water (2 mL) and lyophilized to yield 7-(2,7-dimethyl-2H-indazol-5-yl)-2-methyl-3-(piperidin-4-yl)quinazolin-4(3H)-one as a solid (19 mg, 24%). LCMS (ES, m/z): 388.2 [M+H]⁺. ¹H NMR (DMSO-d₆, 400 MHz): δ_{H} 9.23 (1H, br s), 8.57 (1H, br s), 8.45 (1H, s), 8.16 (1H, d, J=8.4 Hz), 8.07 (1H, br s), 7.94-7.96 (2H, m), 7.42 (1H, s), 4.54 (1H, m), 4.20 (3H, s), 3.38 (2H, d, J=11.9 Hz), 3.08 (2H, m), 2.89 (5H, m), 2.58 (3H, s), 2.02 (2H, d, J=12.7 Hz).

### Example 75

### Synthesis of Compound 232

### Synthesis of Intermediate B149

[chemical structure]

[0879] To a stirred mixture of tert-butyl 4-[5-fluoro-4-oxo-7-(4,4,5,5-tetramethyl-1,3,2-dioxaborolan -2-yl)quinazolin-3-yl]piperidine-1-carboxylate (100.00 mg, 0.21 mmol, 1.00 equiv) and 5-bromo-2,7-dimethylindazole (57.06 mg, 0.25 mmol, 1.20 equiv) in dioxane/water (3 mL, 5:1) was added Pd(DtBPF)Cl₂ (13.77 mg, 0.02 mmol, 0.10 equiv) and K₃PO₄ (134.53 mg, 0.63 mmol, 3.00 equiv). The reaction mixture was stirred overnight at 90° C. under nitrogen atmosphere, then extracted with ethyl acetate (3×10 mL). The combined organic layers were washed with saturated NaCl (1×10 mL), dried over anhydrous Na₂SO₄, and filtered. After filtration, the filtrate was concentrated under reduced pressure to give a residue. The residue was purified by silica gel column chromatography, eluted with PE/EA (1:1) to afford tert-butyl 4-[7-(2,7-dimethylindazol-5-yl)-5-fluoro-4-oxoquinazolin-3-yl]piperidine-1-carboxylate (61.00 mg, 58.74%) as a solid. LCMS (ES, m/z):492 [M+H]⁺.

### Synthesis of Compound 232

[chemical structure]

[0881] A mixture of tert-butyl 4-[7-(2,7-dimethylindazol-5-yl)-5-fluoro-4-oxoquinazolin-3-yl]piperidine-1-carboxylate (61.00 mg, 0.12 mmol, 1.00 equiv) and HCl (gas) in 1,4-dioxane (5 mL) was stirred for 1 h at room temperature. The resulting mixture was concentrated under reduced pressure to give a residue. The residue was purified by reverse flash chromatography (Column: XBridge Prep OBD C18 Column, 30*150 mm, 5 μm; Mobile Phase A: Water (10 mmol/L NH₄HCO₃), Mobile Phase B: acetonitrile; Flow rate: 60 mL/min; Gradient: 5% B to 35% B in 8 min) to afford 7-(2,7-dimethylindazol-5-yl)-5-fluoro-3-(piperidin-4-yl)quinazolin one (25.90 mg, 53.32%) as a solid. LCMS (ES, m/z):392 [M+H]⁺. ¹H NMR (400 MHz, DMSO-d₆) δ 8.45 (d, J=6.7 Hz, 2H), 8.06 (d, J=1.7 Hz, 1H), 7.79 (d, J=1.7 Hz, 1H), 7.69 (dd, J=12.7, 1.8 Hz, 1H), 7.52 (t, J=1.5 Hz, 1H), 4.67 (tt, J=12.0, 3.9 Hz, 1H), 4.21 (s, 3H), 3.14-3.05 (m, 2H), 2.66-2.55 (m, 2H), 2.59 (s, 3H), 2.27 (s, 1H), 1.89 (qd, J=12.0, 4.0 Hz, 2H), 1.81-1.73 (m, 2H).

### Example 76

### Synthesis of Compound 230

### Synthesis of Intermediate B150

[chemical structure]

[0883] To a stirred mixture of tert-butyl 4-[5-fluoro-4-oxo-7-(4,4,5,5-tetramethyl-1,3,2-dioxaborolan-2-yl) quinazolin-3-yl]piperidine-1-carboxylate (200.00 mg, 0.42 mmol, 1.00 equiv) and 6-bromo-8-fluoro-2-methylimidazo[1,2-a]pyridine (116.13 mg, 0.51 mmol, 1.20 equiv) in dioxane/water (3.00 mL, 5:1) was added Pd(DtBPF)Cl₂ (27.54 mg, 0.04 mmol, 0.10 equiv) and K₃PO₄ (269.06 mg, 1.27 mmol, 3.00 equiv). The reaction mixture was stirred overnight at 90° C. under nitrogen atmosphere. The aqueous layer was extracted with ethyl acetate (3x 10 mL). The combined organic layers were washed with saturated NaCl (1×10 mL), dried over anhydrous Na₂SO₄, and filtered. After filtration, the filtrate was concentrated under reduced pressure to give a residue. The residue was purified by silica gel column chromatography, eluted with PE/EA (1:1) to afford tert-butyl 4-(5-fluoro-7-{8-fluoro-2-methylimidazo[1,2-a]pyridin-6-yl} -4-oxoquinazolin-3-yl)piperidine-1-carboxylate (140.00 mg, 66.87%) as a solid. LCMS (ES, m/z):496 [M+H]⁺.

### Synthesis of Compound 230

[chemical structure]

[0885] A mixture of tert-butyl 4-(5-fluoro-7-{8-fluoro-2-methylimidazo[1,2-a]pyridin-6-yl}-4-oxoquinazolin-3-yl)piperidine-1-carboxylate (70.00 mg, 0.14 mmol, 1.00 equiv) and HCl (gas) in 1,4-dioxane (5 mL) was stirred for 1 h at room temperature. The resulting mixture was concentrated under reduced pressure to give a residue. The residue was purified by reverse flash chromatography (Column: XBridge Prep OBD C18 Column, 30*150 mm, 5 μm; Mobile Phase A: water (10 mmol/L NH₄HCO₃), Mobile Phase B: acetonitrile; Flow rate: 60 mL/min; Gradient: 5% B to 58% B in 8 min) to afford 5-fluoro-7-{8-fluoro-2-methylimidazo [1,2-a]pyridin-6-yl}-3-(piperidin-4-yl)quinazolin-4-one (21.10 mg, 37.77%) as a solid. LCMS (ES, m/z):396 [M+H]⁺. ¹H NMR (400 MHz, DMSO-d₆) δ 9.08 (d, J=1.5 Hz, 1H), 8.49 (s, 1H), 7.90 (d, J=1.8 Hz, 1H), 7.84 (dd, J=3.2, 1.1 Hz, 1H), 7.75 (ddd, J=12.7, 2.8, 1.7 Hz, 1H), 7.73 (ddd, J=12.7, 2.8, 1.7 Hz, 1H), 4.66 (tt, J=12.1, 4.0 Hz, 1H), 3.09 (d, J=12.5 Hz, 2H), 2.60 (td, J=12.2, 2.5 Hz, 2H), 2.39 (d, J=0.9 Hz, 3H), 1.89 (qd, J=11.9, 4.0 Hz, 2H), 1.81-1.74 (m, 2H).

### Example 77

### Synthesis of Compound 314

### Synthesis of Intermediate B151

[chemical structure]

[0887] To a stirred mixture of tert-butyl 4-[5-fluoro-4-oxo-7-(4,4,5,5-tetramethyl-1,3,2-dioxaborolan-2-yl) quinazolin-3-yl]piperidine-1-carboxylate (100.00 mg, 0.21 mmol, 1.00 equiv) and 5-bromo-7-fluoro-2-methylindazole (58.07 mg, 0.25 mmol, 1.20 equiv) in dioxane/water (3 mL, 5:1) was added K₃PO₄ (134.53 mg, 0.63 mmol, 3.00 equiv) and Pd(DtBPF)Cl₂ (13.77 mg, 0.02 mmol, 0.10 equiv). The reaction miture was stirred overnight at 90° C. under nitrogen atmosphere. The resulting mixture was extracted with ethyl acetate (3×10 mL). The combined organic layers were washed with saturated NaCl (1×10 mL), dried over anhydrous Na₂SO₄, and filtered. After filtration, the filtrate was concentrated under reduced pressure to give a residue. The residue was purified by silica gel column chromatography, eluted with PE/EA (1:1) to afford tert-butyl 4-(5-fluoro-7-(7-fluoro-2-methyl-2H-indazol-5-yl)-4-oxoquinazolin-3(4H)-yl)piperidine-1-carboxylate (80.00 mg, 76.42%) as a solid. LCMS (ES, m/z):496 [M+H]⁺.

### Synthesis of Compound 314

[chemical structure]

[0889] A mixture of tert-butyl 4-(5-fluoro-7-(7-fluoro-2-methyl-2H-indazol-5-yl)-4-oxoquinazolin-3(4H)-yl) piperidine-1-carboxylate (80.00 mg, 0.16 mmol, 1.00 equiv) and HCl (gas) in 1,4-dioxane (5 ml) was stirred for 1 h at room temperature. The resulting mixture was concentrated under reduced pressure to give a residue. The residue was purified by reverse flash chromatography (Column: XBridge Prep OBD C18 Column, 30*150 mm, 5 μm; Mobile Phase A: water (10 mmol/L NH₄HCO₃), Mobile Phase B: acetonitrile; Flow rate: 60 mL/min; Gradient: 5% B to 55% B in 8 min) to afford 5-fluoro-7-(7-fluoro-2-methyl-2H-indazol-5-yl)-3-(piperidin-4-yl)quinazolin-4(3H)-one (42.60 mg, 66.73%) as a solid. LCMS (ES, m/z):396 [M+H]⁺. ¹H NMR (400 MHz, DMSO-d₆) δ 8.61 (s, 1H), 8.48 (s, 1H), 8.00 (d, J=1.1 Hz, 1H), 7.88 (d, J=1.8 Hz, 1H), 7.79 (dd, J=12.6, 1.8 Hz, 1H), 7.37 (dd, J=12.1, 1.2 Hz, 1H), 4.67 (tt, J=12.1, 4.0 Hz, 1H), 4.23 (s, 3H), 3.13-3.06 (m, 2H), 2.61 (td, J=12.2, 2.5 Hz, 2H), 1.89 (qd, J=11.9, 4.0 Hz, 2H), 1.77 (dd, J=12.8, 3.7 Hz, 2H).

### Example 78

### Synthesis of Compound 315

### Synthesis of Intermediate B152

[chemical structure]

[0891] To a stirred mixture of tert-butyl 4-[5-fluoro-4-oxo-7-(4,4,5,5-tetramethyl-1,3,2-dioxaborolan-2-yl) quinazolin-3-yl]piperidine-1-carboxylate (100.00 mg, 0.21 mmol, 1.00 equiv) and 5-bromo-6-fluoro-2-methylindazole (58.07 mg, 0.25 mmol, 1.20 equiv) in dioxane/water (3 mL, 5:1) was added Pd(DtBPF)Cl₂ (27.54 mg, 0.04 mmol, 0.10 equiv) and K₃PO₄ (134.53 mg, 0.63 mmol, 3.00 equiv). The reaction mixture was stirred overnight at 90° C. under nitrogen atmosphere. The resulting mixture was extracted with ethyl acetate (3×10 mL). The combined organic layers were washed with saturated NaCl (1×10 mL), dried over anhydrous Na₂SO₄, and filtered. After filtration, the filtrate was concentrated under reduced pressure to give a residue. The residue was purified by silica gel column chromatography, eluted with PE/EA (1:1) to afford tert-butyl 4-[5-fluoro-7-(6-fluoro-2-methylindazol-5-yl)-4-oxoquinazolin-3-yl]piperidine-1-carboxylate (60.00 mg, 57.31%) as a solid. LCMS (ES, m/z):496 [M+H]⁺.

### Synthesis of Compound 315

[chemical structure]

[0893] A mixture of tert-butyl 4-[5-fluoro-7-(6-fluoro-2-methylindazol-5-yl)-4-oxoquinazolin-3-yl]piperidine-1-carboxylate (60.00 mg, 0.12 mmol, 1.00 equiv) and HCl (gas) in 1,4-dioxane (5 mL) was stirred for 1 h at room temperature. The resulting mixture was concentrated under reduced pressure to give a residue. The residue was purified by reverse flash chromatography (Column: Xselect CSH OBD Column 30*150 mm Sum, n; Mobile Phase A: water (10 mmol/L NH₄HCO₃), Mobile Phase B: acetonitrile; Flow rate: 60 mL/min; Gradient: 5% B to 36% B in 8 min) to afford 5-fluoro-7-(6-fluoro-2-methylindazol-5-yl)-3-(piperidin-4-yl)quinazolin-4-one (34.90 mg, 72.89%) as a solid. LCMS (ES, m/z):396 [M+H]⁺. ¹H NMR (400 MHz, DMSO-d₆) δ 8.50 (d, J=16.7 Hz, 2H), 8.08 (d, J=7.9 Hz, 1H), 7.66 (d, J=1.9 Hz, 1H), 7.57(m, 1H), 7.48 (m, 1H), 4.68 (tt, J=12.0, 3.9 Hz, 1H), 4.20 (s, 3H), 3.13 — 3.06 (m, 2H), 2.61 (td, J=12.2, 2.5 Hz, 2H), 1.89 (qd, J=11.9, 4.0 Hz, 2H), 1.77 (d, J=10.9 Hz, 2H).

### Example 79

### Synthesis of Compound 316

### Synthesis of Intermediate B153

[chemical structure]

[0895] To a mixture of tert-butyl 4-[5-fluoro-4-oxo-7-(4,4,5,5-tetramethyl-1,3,2-dioxaborolan-2-yl) quinazolin-3-yl]piperidine-1-carboxylate (100.00 mg, 0.21 mmol, 1.00 equiv) and 5-bromo methylindazole-7-carbonitrile (59.85 mg, 0.25 mmol, 1.20 equiv) in dioxane/water (3 mL, 5:1) was added Pd(DtBPF)Cl₂ (13.77 mg, 0.02 mmol, 0.10 equiv) and K₃PO₄ (134.53 mg, 0.63 mmol, 3.00 equiv) in portions at 90° C. under nitrogen atmosphere. The resulting mixture was extracted with ethyl acetate (3×10 mL). The combined organic layers were washed with saturated NaCl (1×10 mL), dried over anhydrous Na₂SO₄, and filtered. After filtration, the filtrate was concentrated under reduced pressure to give a residue. The residue was purified by silica gel column chromatography, eluted with PE/EA (1:1) to afford tert-butyl 4-[7-(7-cyano-2-methylindazol-5-yl)-5-fluoro-4-oxoquinazolin-3-yl]piperidine-1-carboxylate (65.00 mg, 61.22%) as a solid. LCMS (ES, m/z):503 [M+H]⁺.

### Synthesis of Compound 316

[chemical structure]

[0897] A mixture of tert-butyl 4-[7-(7-cyano-2-methylindazol-5-yl)-5-fluoro-4-oxoquinazolin-3-yl]piperidine-1-carboxylate (65.00 mg, 0.13 mmol, 1.00 equiv) and TFA (0.5 mL) in DCM (3 mL) was stirred for 1 h at room temperature. The resulting mixture was concentrated under reduced pressure to give a residue. The residue was purified by reverse flash chromatography (Column:) (Bridge Prep OBD C18 Column, 30*150 mm, 5 μm; Mobile Phase A: water (10 mmol/L NH₄HCO₃), Mobile Phase B: acetonitrile; Flow rate: 60 mL/min; Gradient: 5% B to 45% B in 8 min) to afford 5-[5-fluoro-4-oxo-3-(piperidin-4-yl)quinazolin-7-yl]-2-methylindazole-7-carbonitrile (20.10 mg, 38.62%) as a solid. LCMS (ES, m/z):403 [M+H]⁺. ¹H NMR (400 MHz, DMSO-d₆) δ 8.75 (s, 1H), 8.68 (d, J=1.8 Hz, 1H), 8.51-8.43 (m, 2H), 7.92 (d, J=1.7 Hz, 1H), 7.82 (dd, J=12.6, 1.8 Hz, 1H), 4.67 (tt, J=12.1, 3.9 Hz, 1H), 4.29 (s, 3H), 3.13-3.06 (m, 2H), 2.61 (td, J=12.1, 2.4 Hz, 2H), 1.89 (qd, J=12.0, 4.0 Hz, 2H), 1.82-1.73 (m, 2H).

### Example 80

### Synthesis of Compound 317

### Synthesis of Intermediate B154

[chemical structure]

[0899] To a stirred mixture of tert-butyl 4-[5-fluoro-4-oxo-7-(4,4,5,5-tetramethyl-1,3,2-dioxaborolan-2-yl) quinazolin-3-yl]piperidine-1-carboxylate (100.00 mg, 0.21 mmol, 1.00 equiv) and 6-bromo-2,8-dimethylimidazo[1,2-a]pyridine (57.06 mg, 0.25 mmol, 1.20 equiv) in dioxane/water (3 mL, 5:1) was added Pd(DtBPF)Cl₂ (13.77 mg, 0.02 mmol, 0.10 equiv) and K₃PO₄ (134.53 mg, 0.63 mmol, 3.00 equiv) in portions at 90° C. under nitrogen atmosphere. The resulting mixture was extracted with ethyl acetate (3 ×10 mL). The combined organic layers were washed with saturated NaCl (1×10 mL), dried over anhydrous Na₂SO₄, and filtered. After filtration, the filtrate was concentrated under reduced pressure to give a residue. The residue was purified by silica gel column chromatography, eluted with PE/EA (1:1) to afford tert-butyl 4-(7-{2,8-dimethylimidazo[1,2-a]pyridin-6-yl}-5-fluoro-4-oxoquinazolin-3-yl)piperidine-1-carboxylate (50.00 mg, 48.15%) as a solid. LCMS (ES, m/z):492 [M+H]⁺.

### Synthesis of Compound 317

[chemical structure]

[0901] A mixture of tert-butyl 4-(7-{2,8-dimethylimidazo[1,2-a]pyridin-6-yl}-5-fluoro-4-oxoquinazolin-3-yl)piperidine-1-carboxylate (50.00 mg, 0.10 mmol, 1.00 equiv) and TFA (0.5 mL) in DCM (3 mL) was stirred for 1 h at room temperature. The resulting mixture was concentrated under reduced pressure to give a residue. The residue was purified by reverse flash chromatography (Column: XBridge Prep OBD C18 Column, 30*150 mm, 5 μm; Mobile Phase A: water (10 mmol/L NH₄HCO₃), Mobile Phase B: acetonitrile; Flow rate: 60 mL/min; Gradient: 5% B to 35% B in 8 min) to afford 7-{2,8-dimethylimidazo[1,2-a]pyridin-6-yl}-5-fluoro-3-(piperidin-4-yl)quinazolin-4-one (17.80 mg, 44.71%) as a solid. LCMS (ES, m/z):392 [M+H]⁺. ¹H NMR (400 MHz, DMSO-d₆) δ 9.00 (d, J=2.0 Hz, 1H), 8.48 (s, 1H), 7.85 (d, J=1.7 Hz, 1H), 7.71 (dd, J=14.6, 1.5 Hz, 2H), 7.57 (t, J=1.6 Hz, 1H), 4.67 (tt, J=12.0, 3.9 Hz, 1H), 3.09 (d, J=12.5 Hz, 2H), 2.66-2.56 (m, 2H), 2.54 (s, 3H), 2.37 (s, 3H), 1.89 (qd, J=12.0, 4.0 Hz, 2H), 1.78 (t, J=6.8 Hz, 2H).

### Example 81

### Synthesis of Compound 318

### Synthesis of Intermediate B155

[chemical structure]

[0903] To a stirred mixture of tert-butyl 4-[5-fluoro-4-oxo-7-(4,4,5,5-tetramethyl-1,3,2-dioxaborolan-2-yl) quinazolin-3-yl]piperidine-1-carboxylate (100.00 mg, 0.21 mmol, 1.00 equiv) and 2-bromo-4,6-dimethylpyrazolo[1,5-a]pyrazine (57.31 mg, 0.25 mmol, 1.20 equiv) in dioxane/water (3 mL, 5:1) was added Pd(DtBPF)Cl₂ (13.77 mg, 0.02 mmol, 0.10 equiv) and K₃PO₄ (134.53 mg, 0.63 mmol, 3.00 equiv). The reaction mixture was stirred overnight at 90° C. under nitrogen atmosphere. The resulting mixture was extracted with ethyl acetate (3×10 mL). The combined organic layers were washed with saturated NaCl (1×10 mL), dried over anhydrous Na₂SO₄, and filtered. After filtration, the filtrate was concentrated under reduced pressure to give a residue. The residue was purified by silica gel column chromatography, eluted with PE/EA (1:1) to afford tert-butyl 4-(7-{4,6-dimethylpyrazolo[1,5-a]pyrazin-2-yl}-5-fluoro-4-oxoquinazolin-3-yl)piperidine-1-carboxylate (75.00 mg, 72.08%) as a solid. LCMS (ES, m/z):493 [M+H]⁺.

### Synthesis of Compound 318

[chemical structure]

[0905] A mixture of tert-butyl 4-(7-{4, 6-dimethylpyrazolo[1,5-a]pyrazin-2-yl}-5-fluoro-4-oxoquinazolin-3-yl) piperidine-1-carboxylate (75.00 mg, 0.15 mmol, 1.00 equiv) and HCl (gas) in 1,4-dioxane (5 mL) was stirred for 1 h at room temperature. The resulting mixture was concentrated under reduced pressure to give a residue. The residue was purified by reverse flash chromatography (Column: XBridge Prep OBD C18 Column, 30*150 mm, 5 μm; Mobile Phase A: water (10 mmol/L NH₄HCO₃), Mobile Phase B: acetonitrile; Flow rate: 60 mL/min; Gradient: 5% B to 35% B in 8 min) to afford 7-{4,6-dimethylpyrazolo[1,5-a]pyrazin-2-yl}-5-fluoro-3-(piperidin-4-yl)quinazolin-4-one (16.90 mg, 28.28%) as a solid. LCMS (ES, m/z):393 [M+H]⁺. ¹H NMR (400 MHz, DMSO-d₆) δ 8.55 (d, J=1.4 Hz, 1H), 8.49 (s, 1H), 8.10 (d, J=1.6 Hz, 1H), 7.88 (dd, J=12.1, 1.6 Hz, 1H), 7.77 (d, J=1.0 Hz, 1H), 4.67 (ddd, J=12.1, 8.2, 4.0 Hz, 1H), 3.09 (d, J=12.1 Hz, 2H), 2.72 (s, 3H), 2.66-2.55 (m, 2H), 2.44 (d, J=1.0 Hz, 3H), 2.33 (m, 1H),1.89 (qd, J=11.9, 4.0 Hz, 2H), 1.78 (d, J=10.9 Hz, 2H).

### Example 82

### Synthesis of Compound 319

### Synthesis of Intermediate B156

[chemical structure]

[0907] To a stirred mixture of tert-butyl 4-[5-fluoro-4-oxo-7-(4,4,5,5-tetramethyl-1,3,2-dioxaborolan-2-yl) quinazolin-3-yl]piperidine-1-carboxylate (100.00 mg, 0.21 mmol, 1.00 equiv) and 8-methylimidazo[1,2-a]pyrazin-2-yl trifluoromethanesulfonate (71.29 mg, 0.25 mmol, 1.20 equiv) in dioxane/water (3 mL, 5:1) was added Pd(DtBPF)Cl₂ (13.77 mg, 0.02 mmol, 0.10 equiv) and K₃PO₄ (134.53 mg, 0.63 mmol, 3.00 equiv). The reaction mixture was stirred overnight at 90° C. under nitrogen atmosphere. The resulting mixture was extracted with ethyl acetate (3×10 mL). The combined organic layers were washed with saturated NaCl (1×10 mL), dried over anhydrous Na₂SO₄, and filtered. After filtration, the filtrate was concentrated under reduced pressure to give a residue. The residue was purified by silica gel column chromatography, eluted with PE/EA (1:1) to afford tert-butyl 4-(5-fluoro-7-{8-methylimidazo[1,2-a]pyrazin-2-yl}-4-oxoquinazolin-3-yl)piperidine-1-carboxylate (80.00 mg, 79.13%) as a solid. LCMS (ES, m/z):493 [M+H]⁺.

### Synthesis of Compound 319

[chemical structure]

[0909] A mixture of tert-butyl 4-(5-fluoro-7-{8-methylimidazo[1,2-a]pyrazin-2-yl}-4-oxoquinazolin-3-yl) piperidine-1-carboxylate (80.00 mg, 0.17 mmol, 1.00 equiv) and HCl (gas) in 1,4-dioxane (5 mL) was stirred for 1 h at room temperature. The resulting mixture was concentrated under reduced pressure to give a residue. The residue was purified by reverse flash chromatography (Column: XBridge Prep OBD C18 Column, 30*150 mm, 5 μm; Mobile Phase A: Water (10 mmol/L NH₄HCO₃), Mobile Phase B: ACN; Flow rate: 60 mL/min; Gradient: 5% B to 32% B in 8 min) to afford 5-fluoro-7-{8-methylimidazo[1,2-a]pyrazin-2-yl}-3-(piperidin-4-yl)quinazolin-4-one (17.80 mg, 28.14%) as a solid. LCMS (ES, m/z):393 [M+H]⁺. ¹H NMR (400 MHz, DMSO-d₆) δ 8.75 (s, 1H), 8.48 (s, 1H), 8.28 (s, 1H), 8.10 (d, J=1.5 Hz, 1H), 7.90 (dd, J=12.2, 1.6 Hz, 1H), 4.66 (tt, J=12.1, 4.0 Hz, 1H), 3.13-3.05 (m, 2H), 2.77 (s, 3H), 2.74 (s, 2H), 2.40 (d, J=1.0 Hz, 3H), 1.89 (qd, J=11.9, 4.0 Hz, 2H), 1.82-1.74 (m, 2H).

### Example 83

### Synthesis of Compound 320

### Synthesis of Intermediate B157

[chemical structure]

[0911] To a stirred mixture of tert-butyl 4-[5-fluoro-4-oxo-7-(4,4,5,5-tetramethyl-1,3,2-dioxaborolan -2-yl)quinazolin-3-yl]piperidine-1-carboxylate (100.00 mg, 0.21 mmol, 1.00 equiv) and 5-chloro-3-methoxypyridazine (36.65 mg, 0.25 mmol, 1.20 equiv) in dioxane/water (3 mL, 5:1) was added K₃PO₄ (134.53 mg, 0.633 mmol, 3 equiv) and Pd(DtBPF)Cl₂ (13.77 mg, 0.02 mmol, 0.10 equiv) in portions at 90° C. under nitrogen atmosphere. The resulting mixture was extracted with ethyl acetate (3×10 mL). The combined organic layers were washed with sat. NaCl (1×10 mL), dried over anhydrous Na₂SO₄, and filtered. After filtration, the filtrate was concentrated under reduced pressure to give a residue. The residue was purified by silica gel column chromatography, eluted with PE/EA (1:1) to afford tert-butyl 4-[5-fluoro-7-(6-methoxypyridazin-4-yl) -4-oxoquinazolin-3-yl]piperidine-1-carboxylate (85.00 mg, 88.33%) as a solid. LCMS (ES, m/z):456 [M+H]⁺.

### Synthesis of Compound 320

[chemical structure]

[0913] A mixture of tert-butyl 4-[5-fluoro-7-(6-methoxypyridazin-4-yl)-4-oxoquinazolin-3-yl]piperidine-1-carboxylate (85.00 mg, 0.19 mmol, 1.00 equiv) and HCl (gas) in 1,4-dioxane (5 mL) was stirred for 1 h at room temperature. The resulting mixture was concentrated under reduced pressure to give a residue. The residue was purified by reverse flash chromatography (Column:) (Bridge Prep OBD C18 Column, 30*150 mm, 5 μm; Mobile Phase A: water (10 mmol/L NH₄HCO₃), Mobile Phase B: acetonitrile; Flow rate: 60 mL/min; Gradient: 5% B to 35% B in 8 min) to afford 5-fluoro-7-(6-methoxypyridazin-4-yl)-3-(piperidin-4-yl)quinazolin-4-one (23.40 mg, 35.29%) as a solid. LCMS (ES, m/z):356 [M+H]⁺. ¹H NMR (400 MHz, DMSO-d₆) δ 9.47 (d, J=1.9 Hz, 1H), 8.52 (s, 1H), 8.09 (d, J=1.7 Hz, 1H), 8.00-7.89 (m, 1H), 7.75 (d, J=2.0 Hz, 1H), 4.66 (tt, J=12.0, 3.9 Hz, 1H), 4.11 (s, 3H), 3.13-3.05 (m, 2H), 2.60 (td, J=12.1, 2.4 Hz, 2H), 1.89 (qd, J=11.9, 4.0 Hz, 2H), 1.82-1.73 (m, 2H).

### Example 84

### Synthesis of Compound 321

### Synthesis of Intermediate B158

[chemical structure]

[0915] To a stirred mixture of tert-butyl 4-[5-fluoro-4-oxo-7-(4,4,5,5-tetramethyl -1,3,2-dioxaborolan-2-yl) quinazolin-3-yl]piperidine-1-carboxylate (100.00 mg, 0.21 mmol, 1.00 equiv) and 4-bromo-1-(oxan-2-yl) pyrazole (58.58 mg, 0.25 mmol, 1.20 equiv) in dioxane/water (3 mL, 5:1) was added K₃PO₄ (134.53 mg, 0.63 mmol, 3.00 equiv) and Pd(DtBPF)Cl₂ (13.77 mg, 0.02 mmol, 0.10 equiv). The reaction mixture was stirred overnight at 90° C. under nitrogen atmosphere. The resulting mixture was extracted with ethyl acetate (3×10 mL). The combined organic layers were washed with saturated NaCl (1×10 mL), dried over anhydrous Na₂SO₄, and filtered. After filtration, the filtrate was concentrated under reduced pressure to give a residue. The residue was purified by silica gel column chromatography, eluted with PE/EA (1:1) to afford tert-butyl 4-{5-fluoro-7-[1-(oxan-2-yl) pyrazol-4-yl]-4-oxoquinazolin-3-yl}piperidine-1-carboxylate (53.00 mg, 50.42%) as a solid. LCMS (ES, m/z):498 [M+H]⁺.

### Synthesis of Compound 321

[chemical structure]

[0917] A mixture of tert-butyl 4-{5-fluoro-7-[1-(oxan-2-yl)pyrazol-4-yl]-4-oxoquinazolin-3-yl}piperidine -1-carboxylate (53.00 mg, 0.17 mmol, 1.00 equiv) and HCl (gas) in 1,4-dioxane (5 mL) was stirred for 1 h at room temperature. The resulting mixture was concentrated under reduced pressure to give a residue. The residue was purified by reverse flash chromatography (Column: YMC-Actus Triart C18, 30*150 mm, 5 μm; Mobile Phase A: water (10 mmol/L NH₄HCO₃), Mobile Phase B: acetonitrile; Flow rate: 60 mL/min; Gradient: 5% B to 40% B in 8 min) to afford 5-fluoro-3-(piperidin-4-yl)-7-(1H-pyrazol-4-yl)quinazolin-4-one (13.80 mg, 41.35%) as a solid. LCMS (ES, m/z):314 [M+H]+. ¹H NMR (400 MHz, DMSO-d₆) δ 13.00 (s, 1H), 8.31 (s, 1H), 8.23 (s, 2H), 7.68 (d, J=1.6 Hz, 1H), 7.53 (dd, J=12.6, 1.7 Hz, 1H), 4.64 (tt, J=12.1, 4.0 Hz, 1H), 3.10 (d, J=12.4 Hz, 2H), 2.67 — 2.57 (m, 2H), 1.95(m, 1H), 1.73 (m, 2H), 1.71 (m, 2H).

### Example 85

### Synthesis of Compound 238

### Synthesis of Intermediate B159

[chemical structure]

[0919] Argon was bubbled into a mixture of tert-butyl 4-((6-bromo-4-oxo-3,4-dihydroquinazolin-2-yl)amino)piperidine-1-carboxylate (90 mg, 0.21 mmol), 8-fluoro-2-methyl-6-(4,4,5,5-tetramethyl-1,3,2-dioxaborolan-2-yl)imidazo[1,2-a]pyridine (57.9 mg, 0.21 mmol), and dioxane (2.1 mL). To the reaction mixture was added water (0.1 mL), followed by Cs₂CO₃ (174 mg, 0.53 mjmmol) and Pd(dppf)Cl₂.CH₂Cl₂ (17.4 mg, 0.021 mmol). The reaction mixture was purged with argon for 10 min, then heated at 95° C. for 16 h. DMF was added to the cooled reaction mixture followed by dropwise addition of 1 N HCl to pH 7. The reaction mixture was filtered through Celite, rinsed with DMF, and the filtrate was concentrated in vacuo to give a residue. The residue was purified by silica gel chromatography using a gradient of 80 to 100% of ethyl acetate in hexane to provide tert-butyl 4-((6-(8-fluoro-2-methylimidazo[1,2-a]pyridin-6-yl)-4-oxo-3,4-dihydroquinazolin-2-yl)amino)piperidine-1-carboxylate (62 mg, 59%). LCMS (ES, m/z): 493.0 [M+H]⁺. ¹H NMR (DMSO-d₆, 400 MHz): δ_{H} 10.75 (1H, s), 8.81 (1H, s), 8.16 (1H, d, J=2.3 Hz), 7.91 (1H, dd, J=8.5, 2.3 Hz), 7.81 (1H, d, J=2.9 Hz), 7.51 (1H, d, J=12.6 Hz), 7.35 (1H, d, J=8.6 Hz), 6.39 (1H, s), 4.00 (1H, br s), 3.84 (2H, d, J=13.3 Hz), 2.96 (2H, br s), 2.36 (3H, s), 1.93 (2H, d, J=12.3 Hz), 1.40 (9H, s), 1.31-1.36 (2H, m).

### Synthesis of Compound 238

[chemical structure]

[0921] To tert-butyl 4-((6-(8-fluoro-2-methylimidazo[1,2-a]pyridin-6-yl)-4-oxo-3,4-dihydroquinazolin-2-yl)amino)piperidine-1-carboxylate (62 mg, 0.13 mmol) was added 4 N HCl in dioxane (2 mL). The suspension was stirred for 12 h. The reaction was concentrated, dissolved in water, and filtered through a 40 μm syringe filter. The solution was neutralized to pH 6-7 with 1 N NaOH. A precipitate formed and was collected by filtration, rinsed with water, and dried. The solid was purified by silica gel chromatography using a gradient from 0 to 30% of methanol in 2% Et₃N in CH₂Cl₂ to afford 6-(8-fluoro-2-methylimidazo[1,2-a]pyridin-6-yl)-2-(piperidin ylamino)quinazolin-4(3H)-one (22 mg, 45%). LCMS (ES, m/z): 393.1 [M+H]⁺.¹H NMR (DMSO-d₆, 400 MHz): δ_{H} 8.81 (1H, s), 8.17 (1H, s), 7.92 (1H, d, J=8.6 Hz), 7.80 (1H, s), 7.51 (1H, d, J=12.6 Hz), 7.33 (1H, d, J=8.6 Hz), 6.84 (1H, s), 4.07 (1H, br s), 3.23-3.25 (2H, m), 3.00 (2H, t, J=11.7 Hz), 2.35 (3H, s), 2.08 (2H, br s), 1.62 (2H, br s).

### Example 86

### Synthesis of Compound 247

### Synthesis of Intermediate B160

[chemical structure]

[0923] To a solution of LDA (29.06 mL, 2 mol/L, 2.50 equiv) in THF (80 mL) was added 4-bromo-2-methylbenzoic acid (5 g, 23.251 mmol, 1.00 equiv) in THF (20 mL) dropwise at −40° C. under N₂ atmosphere. The reaction mixture was stirred at −40° C. for 30 min. To the reaction mixture was added paraformaldehyde (2.79 g, 93.000 mmol, 4.00 equiv) in portions at 15° C. The reaction mixture was stirred for an additional 4 h at room temperature, then quenched with water (200 mL) at 0° C. The reaction mixture was acidified to pH 3 with HCl (aq), then extracted with ethyl acetate (3×50 mL). The combined organic layers were washed with brine (1×50 mL), dried over anhydrous Na₂SO₄, and filtered. After filtration, the filtrate was concentrated under reduced pressure to give a residue. The residue was purified by silica gel column chromatography, eluted with PE/EtOAc (3:1) to afford 6-bromo-3,4-dihydro-2-benzopyran-1-one (1.6g,30.31%) as a yellow solid. LCMS (ES, m/z): 227 [M+H]⁺.

### Synthesis of Intermediate B161

[chemical structure]

[0925] To a stirred mixture of 6-bromo-3,4-dihydro-2-benzopyran-1-one (2.4 g, 10.570 mmol, 1.00 equiv) and tert-butyl 4-aminopiperidine-1-carboxylate (3.18 g, 15.855 mmol, 1.50 equiv) in DCM (50.00 mL) was added AlMe₃ in toluene (7.93 mL, 2 mol/L, 1.50 equiv) dropwise at 0° C. under nitrogen atmosphere. The resulting mixture was stirred for 2 h at 40° C. under nitrogen atmosphere, then quenched with water (100 mL) at 0° C. The reaction mixture was acidified to pH 3 with HCl (aq.), then extracted with ethyl acetate (3×50 mL). The combined organic layers were washed with brine (1×100 mL), dried over anhydrous Na₂SO₄, and filtered. After filtration, the filtrate was concentrated under reduced pressure to afford tert-butyl 4-[4-bromo-2-(2-hydroxyethyl) benzamido]piperidine-1-carboxylate (3.9g,86.34%) as a solid. LCMS (ES, m/z): 427 [M+H]⁺.

### Synthesis of Intermediate B162

[chemical structure]

[0927] To a stirred solution of tert-butyl 4-[4-bromo-2-(2-hydroxyethyl) benzamido]piperidine-1-carboxylate (3.40 g, 7.956 mmol, 1.00 equiv) and PPh₃(4.17 g, 15.899 mmol, 2.00 equiv) in THF (120.00 mL) was added DTBAD (3.66 g, 15.912 mmol, 2.00 equiv) in THF (20 mL) dropwise at 0° C. under nitrogen atmosphere. The resulting mixture was stirred for 2 h at room temperature under nitrogen atmosphere, then concentrated under reduced pressure to give a residue. The residue was purified by silica gel chromatography, eluted with PE/EtOAc (3:1) to afford tert-butyl 4-(6-bromo-1-oxo-3,4-dihydroisoquinolin-2-yl) piperidine-1-carboxylate (2.8g,85.98%) as a solid. LCMS (ES, m/z): 409 [M+H]⁺.

### Synthesis of Intermediate B163

[chemical structure]

[0929] To a mixture of tert-butyl 4-(6-bromo-1-oxo-3,4-dihydroisoquinolin-2-yl) piperidine-1-carboxylate (2.50 g, 6.108 mmol, 1.00 equiv) and 4,4,5,5-tetramethyl-2-(tetramethyl-1,3,2-dioxaborolan-2-yl)-1,3,2-dioxaborolane (3.10 g, 12.208 mmol, 2.00 equiv) in dioxane (50.00 mL) was added KOAc (1.80 g, 18.341 mmol, 3.00 equiv) and Pd(dppf)Cl₂ CH₂Cl₂(0.50 g, 0.614 mmol, 0.10 equiv). The reaction mixture was stirred for 2 h at 80° C. under a nitrogen atmosphere, then concentrated under reduced pressure to give a residue. The residue was purified by silica gel chromatography, eluted with PE/EtOAc (3:1) to afford tert-butyl 4-[1-oxo-6-(4,4,5,5-tetramethyl-1,3,2-dioxaborolan-2-yl)-3,4-dihydroisoquinolin-2-yl]piperidine-1-carboxylate (2.5g,89.69%) as a solid. LCMS (ES, m/z): 457 [M+H]⁺.

### Synthesis of Intermediate B164

[chemical structure]

[0931] To a mixture of tert-butyl 4-[1-oxo-6-(4,4,5,5-tetramethyl-1,3,2-dioxaborolan-2-yl)-3,4-dihydroisoquinolin-2-yl]piperidine-1-carboxylate (120.00 mg, 0.263 mmol, 1.00 equiv) and 6-bromo-8-fluoro-2-methylimidazo[1,2-a] pyridine (66.25 mg, 0.289 mmol, 1.10 equiv) in dioxane (2.00 mL) and water (0.50 mL) was added K₂CO₃(109.02 mg, 0.789 mmol, 3.00 equiv) and Pd(dppf)Cl₂ CH₂Cl₂(10.71 mg, 0.013 mmol, 0.05 equiv). The reaction mixture was stirred for 2 h at 80° C. under a nitrogen atmosphere, then concentrated under reduced pressure to give a residue. The residue was purified by silica gel column chromatography, eluted with CH₂Cl₂/MeOH (15:1) to afford tert-butyl 4-(6-[8-fluoro-2-methylimidazo[1,2-a]pyridin-6-yl]-1-oxo-3,4-dihydroisoquinolin-2-yl) piperidine-1-carboxylate (100 mg,79.47%) as a solid. LCMS (ES, m/z): 479 [M+H]⁺.

### Synthesis of Compound 247

[chemical structure]

[0933] A mixture of tert-butyl 4-(6-[8-fluoro-2-methylimidazo[1,2-a] pyridin-6-yl]-1-oxo-3,4-dihydroisoquinolin-2-yl) piperidine-1-carboxylate (100.00 mg, 0.209 mmol, 1.00 equiv) and TFA (0.20 mL) in DCM (1.00 mL) was stirred for 2 h at room temperature under nitrogen atmosphere, then concentrated under reduced pressure to give a residue. The residue was purified by Prep-HPLC (Column, XBridge Prep OBD C18 Column, 30×150 mm Sum; mobile phase, Water (10 mmol/L NH₄HCO₃) and acetonitrile; Gradient: 5% PhaseB up to 40% in 8 min) to afford 6-[8-fluoro-2-methylimidazo[1,2-a] pyridin-6-yl]-2-(piperidin-4-yl)-3,4-dihydroisoquinolin-1-one (36.5 mg, 46.16%) as a solid. LCMS (ES, m/z): 379 [M+H]⁺. ¹H NMR (400 MHz, DMSO-d6) δ 8.85 (d, J=1.6 Hz, 1H), 7.95 (d, J=8.0 Hz, 1H), 7.87-7.81 (m, 1H), 7.74-7.66 (m, 2H), 7.56 (dd, J=12.6, 1.5 Hz, 1H), 4.59-4.49 (m, 1H), 3.48 (t, J=6.5 Hz, 2H), 3.06-2.95 (m, 4H), 2.57 (d, J=12.0 Hz, 2H), 2.38 (s, 3H), 1.62 (tt, J=12.0, 6.0 Hz, 2H), 1.51 (d, J=11.6 Hz, 2H).

### Example 87

### Synthesis of Compound 239

### Synthesis of Compound 239

[chemical structure]

[0935] To a suspension of 2-(2,7-dimethyl-2H-indazol-5-yl)-6-(methyl(piperidin-4-yl)amino)quinazolin-4(3H)-one (28.0 mg, 0.070 mmol) in DCM (1.35 mL) and ethanol (0.43 mL) was added formaldehyde, 37% in water (25.9 uL, 0.348 mmol), followed by NaBH(OAc)₃ (88.5 mg, 0.417 mmol). The reaction mixture was stirred for 2 h. A solution of 10% NH₄OH was added dropwise and the resulting solution was concentrated in vacuo to give a residue. The residue was purified by flash chromatography on a silica gel column using a gradient of 10-30% methanol in DCM. Selected fractions were combined and concentrated in vacuo to give a residue. The residue was partitioned between a solution of 5% methanol in DCM (5 ml) and water (5 ml). To this suspension was added a saturated solution of NaHCO₃ (2.5 ml). The aqueous layer was extracted with a solution of 5% methanol in DCM (4×5 mL). The combined organic layers were washed with brine, dried over Na₂SO₄, filtered, and concentrated in vacuo to afford 2-(2,7-dimethyl-2H-indazol-5-yl)-6-(methyl(1-methylpiperidin-4-yl)amino)quinazolin-4(3H)-one (19 mg, 66%) as a solid. LCMS (ES, m/z): 417.3 [M+H]⁺. ¹H NMR (DMSO-d₆, 400 MHz): δ 12.13 (1H, s), 8.48 (1H, s), 8.38 (1H, s), 7.85 (1H, s), 7.60 (1H, d, J=9.0 Hz), 7.42 (1H, dd, J=9.2, 3.0 Hz), 7.28 (1H, d, J=3.0 Hz), 4.19 (3H, s), 3.67-3.75 (1H, m), 2.83-2.87 (5H, m), 2.55 (3H, s), 2.19 (3H, s), 2.06 (2H, t, J=11.5 Hz), 1.74-1.83 (2H, m), 1.61 (2H, d, J=11.8 Hz).

### Example 88

### Synthesis of Compound 306

### Synthesis of Compound 306

[chemical structure]

[0937] A mixture of tert-butyl 4-(7-bromo-4-oxoquinazolin-3(4H)-yl)piperidine-1-carboxylate (120 mg, 0.29 mmol), 2-methyl-6-(4,4,5,5-tetramethyl-1,3 ,2-dioxaborolan-2-yl)-8-(trifluoromethyl)imidazo[1,2-a]pyridine (134 mg, 0.41 mmol), PdCl₂(dppf) (21 mg, 0.029 mmol), and K₂CO₃ (203 mg, 1.47 mmol) was dissolved in dioxane (2.0 mL) and water (345 μL), then heated at 90° C. for 4 h under argon atmosphere. The reaction mixture was diluted with ethyl acetate (25 mL) and washed with saturated NaHCO₃ (20 mL) and brine (2×20 mL). The organic phase was then filtered under vacuum, dried over Na₂SO₄, filtered, and the filtrate concentrated in vacuo to give a residue. The residue was purified by flash chromatography on a silica gel column using a gradient of 70-100% ethyl acetate in hexane. Selected fractions were combined and evaporated under reduced pressure to yield a solid. To the resulting solid was added formic acid (5 mL) and the resulting mixture was stirred vigorously at 70° C. for 2 hours. The reaction mixture was concentrated under reduced pressure and diluted with DCM (20 mL). The organic phase was neutralized with 1 M NaOH (10 mL) and washed with brine (20 mL). The organic layer was dried over Na₂SO₄, filtered and the filtrate concentrated in vacuo to give a residue. The residue was purified by flash chromatography on a neutral alumina column using a gradient of 0-10% methanol in DCM to afford 7-(2-methyl-8-(trifluoromethyl)imidazo[1,2-a]pyridin-6-yl)-3-(piperidin-4-yl)quinazolin-4(3H)-one (28 mg, 26%) as a solid. LCMS (ES, m/z): 428.1 [M+H]⁺. ¹H NMR (CDCl₃, 300 MHz): δ 8.53 (1H, s), 8.44 (1H, d, J=8.3 Hz), 8.24 (1H, s), 7.91 (1H, s), 7.84 (1H, s), 7.72 (1H, d,=8.3 Hz), 7.57 (1H, s), 4.99 (1H, m), 3.33 (2H, d,=12.3 Hz), 2.90 (2H, t, J=11.9 Hz), 2.58 (3H, s), 1.81-2.03 (5H, br m).

### Example 89

### Synthesis of Compound 322

### Synthesis of Intermediate B165

[chemical structure]

[0939] A sealed tube was charged with 6-bromo-8-fluoroisoquinolin-1(2H)-one (450 mg, 1.86 mmol) and potassium carbonate (771 mg, 5.58 mmol). The mixture was dissolved in 1,2-dimethoxyethane (9 mL) and stirred vigorously for 20 minutes. To this suspension was added tert-butyl 4-((methylsulfonyl)oxy)piperidine-1-carboxylate (1.59 g, 5.58 mmol). The reaction mixture was stirred for 24 h at 100° C. The reaction mixture was concentrated in vacuo, taken up in CH₂Cl₂ (50 mL), and washed with saturated NaHCO₃ (20 mL). The organic layer was dried over anhydrous Na₂SO₄, filtered, and the filtrate concentrated under reduced pressure to give a residue. The residue was purified by flash chromatography on silica gel using a gradient of 0-100% ethyl acetate in hexane to afford tert-butyl 4-(6-bromo-8-fluoro-1-oxoisoquinolin-2(1H)-yl)piperidine-1-carboxylate (610 mg, 77%) as a solid. LCMS (ES, m/z): 447.0 [M+Na]⁺.

### Synthesis of Intermediate B166

[chemical structure]

[0941] A mixture of 6-bromo-2,8-dimethylimidazo[1,2-b]pyridazine (200 mg, 886 μmol), bis(pinacolato)diboron (225 mg, 886 μmol), Pd(dppf)Cl₂ (50 mg, 68.2 μmol), and potassium acetate (201 mg, 2.05 mmol) in dioxane (4.5 mL) was heated to 100° C. for 1 h. Then to the reaction mixture, a solution of tert-butyl 4-(6-bromo-8-fluoro-1-oxoisoquinolin-2(1H)-yl)piperidine-1-carboxylate (290 mg, 682 μmol) in dioxane (3.6 mL) was added, followed by cesium carbonate (667 mg, 2.05 mmol) and water (0.9 mL) under argon. The reaction mixture was heated at 90° C. for 2 h and then cooled to room temperature. The reaction mixture was filtered over celite using 10% methanol in DCM as eluent. The volatiles were evaporated under reduced pressure. Water (20 mL) and DCM (30 mL) were added, and the layers were separated. The aqueous layer was extracted with DCM (3×20 mL). The organic layers were combined, dried over Na₂SO₄, filtered, and the filtrate concentrated under reduced pressure to give a residue. The residue was purified by flash chromatography on silica gel using a gradient of 0-100% ethylacetate in DCM to afford tert-butyl 4-(6-(2,8-dimethylimidazo[1,2-b]pyridazin-6-yl)-8-fluoro-1-oxoisoquinolin-2(1H)-yl)piperidine-1-carboxylate (240 mg, 72%) as a solid. LCMS (ES, m/z): 492.2 [M+H]⁺.

### Synthesis of Compound 322

[chemical structure]

[0943] To a solution of tert-butyl 4-(6-(2,8-dimethylimidazo[1,2-b]pyridazin-6-yl)-8-fluoro-1-oxoisoquinolin-2(1H)-yl)piperidine-1-carboxylate (240 mg, 488 μmol) in dioxane (4.9 mL) was added 4.0 M HCl in dioxane (9.76 mL, 39.1 mmol). The resulting mixture was stirred at room temperature for 1 hour. The reaction mixture was concentrated in vacuo, taken up in CH₂Cl₂ (2×30 mL), and washed with saturated NaHCO₃ (15 mL). The aqueous phase was extracted with a DCM (2×20 mL). The organic layers were combined, dried over Na₂SO₄, filtered, and the filtrate concentrated in vacuo to give a residue. The residue was purified on a silica gel cartridge using a gradient of MeOH/NH₄OH (9:1) from 0-20% in CH₂Cl₂ to afford 6-(2,8-dimethylimidazo[1,2-b]pyridazin-6-yl)-8-fluoro-2-(piperidin-4-yl)isoquinolin-1(2H)-one (163 mg, 85%) as a solid. LCMS (ES, m/z): 392.2 [M+H]⁺. ¹H NMR (CHCl₃-d, 400 MHz): δ_{H} 7.81 (2H, d, J=10.9 Hz) 7.72 (1H, d, J=12.6 Hz), 7.30 (1H, s), 7.24 (1H, d, J=10.9 Hz), 6.59 (1H, d, J=7.5 Hz), 5.15-5.09 (1H, m), 3.26 (2H, d, J=12.2 Hz), 2.87 (2H, t, J=11.9 Hz), 2.73 (3H, s), 2.55 (3H, s), 1.94 (2H, d, J=12.0 Hz), 1.78 (2H, qd, J=12.1, 4.0 Hz).

### Example 90

### Exemplary Splicing Assay for Monitoring Expression Levels of Splice Variants

[0944] Compounds described herein were used to modulate RNA transcript abundance in cells. The expression of a target mRNA was measured by detecting the formation of an exon-exon junction in the canonical transcript (CJ). A compound mediated exon-inclusion event was detected by observing an increase in formation of a new junction with an alternative exon (AJ). Real-time qPCR assays were used to detect these splicing switches and interrogate the potency of various compounds towards different target genes. A high-throughput real time quantitative PCR (RT-qPCR) assay was developed to measure these two isoforms of the mRNA (CJ and AJ) for an exemplary gene, HTT, together with a control housekeeping gene, GAPDH or GUSB or PPIA, used for normalization. Briefly, the A673 or K562 cell line was treated with various compounds described herein (e.g., compounds of Formula (I)). After treatment, the levels of the HTT mRNA targets were determined from each sample of cell lysate by cDNA synthesis followed by qPCR.

### Materials:

[0945] Cells-to-C_{T} 1-step kit: ThermoFisher A25602, Cells-to-CT lysis reagent: ThermoFisher 4391851C, TaqMan™ Fast Virus 1-Step Master Mix: ThermoFisher 4444436
[0946] GAPDH: VIC-PL, ThermoFisher 4326317E (Assay: Hs99999905_m1)—used for K562/suspension cell lines
[0947] GUSB: VIC-PL, ThermoFisher 4326320E (Assay: Hs99999908_m1)—used for K562/suspension cell lines
[0948] PPIA: VIC-PL, ThermoFisher 4326316E (Assay: Hs99999904_m1) — used for A673/adherent cell lines

Probe/primer sequences
Canonical junction (CJ)
HTT Primer 1: TCCTCCTGAGAAAGAGAAGGAC
HTT Primer 2: GCCTGGAGATCCAGACTCA
HTT CY5-Probe: /5Cy5/TGGCAACCCTTGAGGCCCTGTCCT/
3IAbRQSp/
Alternative junction (AJ)
HTT Primer 1: TCCTGAGAAAGAGAAGGACATTG
HTT Primer 2: CTGTGGGCTCCTGTAGAAATC
HTT FAM-Probe: /56-FAM/TGGCAACCC/ZEN/TTGAGAGGCAAGC
CCT/3IABkFQ/

### Description

[0949] The A673 cell line was cultured in DMEM with 10% FBS. Cells were diluted with full growth media and plated in a 96-well plate (15,000 cells in 100 ul media per well). The plate was incubated at 37° C. with 5% CO₂ for 24 hours to allow cells to adhere. An 11-point 3-fold serial dilution of the compounds was made in DMSO then diluted in media in an intermediate plate. Compounds were transferred from the intermediate plate to the cell plate with the top dose at a final concentration of 10 uM in the well. Final DMSO concentration was kept at or below 0.25%. The cell plate was returned to the incubator at 37° C. with 5% CO₂ for an additional 24 hours.

[0950] The K562 cell line was cultured in IMDM with 10% FBS. For K562, cells were diluted with full growth media and plated in either a 96-well plate (50,000 cells in 50 uL media per well) or a 384-well plate (8,000-40,000 cells in 45 uL media per well). An 11-point 3-fold serial dilution of the compounds were made in DMSO then diluted in media in an intermediate plate. Compound was transferred from the intermediate plate to the cell plate with the top dose at a final concentration of 10 uM in the well. Final DMSO concentration was kept at or below 0.25%. Final volume was 100 uL for 96-well plate and 50 uL for 384-well plate. The cell plate was then placed in an incubator at 37° C. with 5% CO2 for 24 hours.

[0951] The cells were then gently washed with 50 uL-100 uL cold PBS before proceeding to addition of lysis buffer. 30 uL-50 uL of room temperature lysis buffer with DNAse I (and optionally RNAsin) was added to each well. Cells were shaken/mixed thoroughly at room temperature for 5-10 minutes for lysis to take place and then 3 uL-5 uL of room temperature stop solution was added and wells were shaken/mixed again. After 2-5 minutes, the cell lysate plate was transferred to ice for RT-qPCR reaction setup. The lysates could also be frozen at −80° C. for later use.

[0952] In some cases, a direct lysis buffer was used. An appropriate volume of 3× lysis buffer (10 mM Tris, 150 mM NaCl, 1.5%-2.5% Igepal and 0.1-1 U/uL RNAsin, pH 7.4) was directly added to either K562 or A673 cells in media and mixed by pipetting 3 times. The plates were then incubated at room temperature with shaking/rocking for 20-50 minutes to allow for lysis to take place. After this time, the cell lysate plate was transferred to ice to set up for the RT-qPCR reactions. The lysates could also be frozen at −80° C. for later use.

[0953] To set up 10 uL RT-qPCR reactions, cell lysates were transferred to 384-well qPCR plates containing the master mix according to the table below. The plates were sealed, gently vortexed, and spun down before the run. The volumes were adjusted accordingly in some instances where the reaction was carried in 20 uL. The table below summarizes the components of the RT-qPCR reactions:

| Component | 1X |
|---|---|
| Taqman 1-step RT-qPCR mix (4X) | 2.5 |
| 20X AJ Primers + Probe (FAM) | 0.5 |
| 20X CJ Primers + Probe (CY5) | 0.5 |
| 20X PPIA Control (VIC) | 0.5 |
| Cell lysate (1X) | 1-2 |
| H₂O | 4-5 |
| Total volume | 10 |

[0954] The RT-qPCR reaction was performed using a QuantStudio (ThermoFisher) under the following fast cycling conditions. All samples and standards were analyzed at least in duplicate. In some instances, bulk room temperature (RT) step of 5-10 minutes was completed for all plates before proceeding with qPCR. The table below summarizes the PCR cycle:

| Step | # cycles | Temp. | Time |
|---|---|---|---|
| RT step | 1 | 50° C. | 5 min |
| RT inactivation/ | 1 | 95° C. | 20 sec |
| initial denaturation | | | |
| Amplification | 40 | 95° C. | 3 sec |
| | | 60° C. | 30 sec |

[0955] The data analysis was performed by first determining the ΔCt vs the housekeeper gene. This ΔCt was then normalized against the DMSO control (ΔΔCt) and converted to RQ (relative quantification) using the 2^(−ΔΔCt) equation. The RQ were then converted to a percentage response by arbitrarily setting an assay window of 3.5 ΔCt for HTT-CJ and an assay window of 9 ΔCt for HTT-AJ. These assay windows correspond to the maximal modulation observed at high concentration of the most active compounds. The percentage response was then fitted to the 4 parametric logistic equation to evaluate the concentration dependence of compound treatment. The increase in AJ mRNA is reported as AC₅₀ (compound concentration having 50% response in AJ increase) while the decrease in CJ mRNA levels is reported as IC₅₀ (compound concentration having 50% response in CJ decrease).

[0956] A summary of these results is illustrated in Table 6, wherein “A” represents an AC₅₀/IC₅₀ of less than 100 nM; “B” represents an AC₅₀/IC₅₀of between 100 nM and 1 μM; and “C” represents an AC₅₀/IC₅₀ of between 1 μM and 10 μM; and “D” represents an AC₅₀/IC₅₀ of greater than 10 μM.

TABLE 6
Modulation of RNA Splicing by Exemplary Compounds

| | HTT AJ | HTT CJ |
|---|---|---|
| Compound | AC₅₀ | AC₅₀ |
| No. | (nM) | (nM) |
| 108 | D | D |
| 152 | D | D |
| 153 | D | D |
| 156 | C | C |
| 157 | D | D |
| 158 | D | D |
| 159 | D | D |
| 160 | D | D |
| 161 | D | D |
| 162 | D | D |
| 163 | D | D |
| 165 | D | D |
| 166 | C | C |
| 167 | D | D |
| 172 | D | D |
| 173 | D | D |
| 174 | B | B |
| 175 | C | D |
| 176 | C | C |
| 177 | D | D |
| 178 | D | D |
| 179 | D | D |
| 180 | D | D |
| 181 | B | B |
| 182 | C | C |
| 185 | C | B |
| 186 | A | A |
| 188 | C | C |
| 190 | B | B |
| 191 | D | D |
| 192 | D | D |
| 203 | D | D |
| 204 | D | D |
| 205 | B | B |
| 206 | B | B |
| 207 | C | C |
| 208 | C | D |
| 209 | B | C |
| 210 | C | C |
| 215 | C | C |
| 216 | C | C |
| 217 | C | C |
| 218 | C | C |
| 219 | C | C |
| 220 | D | D |
| 221 | D | D |
| 222 | C | C |
| 223 | C | C |
| 224 | D | D |
| 225 | D | D |
| 226 | D | D |
| 227 | C | C |
| 228 | B | B |
| 229 | D | D |
| 230 | A | A |
| 231 | B | B |
| 232 | A | A |
| 233 | B | B |
| 234 | C | C |
| 235 | D | D |
| 236 | B | B |
| 237 | B | B |
| 238 | D | D |
| 239 | D | D |
| 241 | C | C |
| 242 | A | A |
| 243 | A | A |
| 244 | D | D |
| 245 | B | B |
| 246 | C | C |
| 247 | C | C |
| 248 | B | A |
| 249 | C | C |
| 250 | A | A |
| 251 | B | B |
| 252 | D | D |
| 253 | C | C |
| 254 | C | C |
| 255 | C | C |
| 256 | B | B |
| 257 | B | B |
| 258 | D | C |
| 259 | B | B |
| 260 | B | B |
| 261 | D | D |
| 262 | C | C |
| 263 | D | D |
| 264 | C | C |
| 265 | A | A |
| 266 | A | A |
| 267 | B | C |
| 268 | C | C |
| 269 | D | D |
| 270 | C | C |
| 271 | C | C |
| 272 | B | A |
| 273 | B | A |
| 274 | A | A |
| 276 | A | A |
| 277 | B | B |
| 278 | A | A |
| 279 | B | B |
| 280 | B | B |
| 281 | C | C |
| 282 | D | D |
| 283 | B | B |
| 284 | D | D |
| 285 | D | C |
| 286 | C | C |
| 287 | B | B |
| 288 | C | C |
| 290 | B | B |
| 297 | C | C |
| 298 | B | B |
| 299 | D | D |
| 300 | C | B |
| 301 | C | C |
| 302 | C | C |
| 303 | C | C |
| 304 | C | C |
| 305 | C | B |
| 308 | C | C |
| 313 | D | D |

[0957] Additional studies were carried out for a larger panel of genes using the protocol provided above. The junction between flanking upstream and downstream exons was used to design canonical junction qPCR assays. At least one of the forward primer, reverse primer or the CY5-labeled 5′ nuclease probe (with 3′ quencher such as ZEN/Iowa Black FQ) was designed to overlap with the exon junction to capture the CJ mRNA transcript. BLAST was used to confirm the specificity of the probeset and parameters such as melting temperature, GC content, amplicon size, and primer dimer formation are considered during their design. Data for the decrease in CJ mRNA levels for three exemplary genes (HTT, SMN2, and Target C) analyzed in this panel are reported as IC₅₀ (compound concentration having 50% response in CJ decrease).

[0958] A summary of the results from the panel is illustrated in Table 7, wherein “A” represents an IC₅₀ of less than 100 nM; “B” represents an IC₅₀ of between 100 nM and 1 μM; and “C” represents an IC₅₀ of between 1 μM and 10 μM; and “D” represents an IC₅₀ of greater than 10 μM.

TABLE 7
Modulation of RNA Splicing by Exemplary Compounds

| Compound No. | HTT | SMN2 | Target C |
|---|---|---|---|
| 108 | D | C | C |
| 152 | D | D | D |
| 153 | D | C | — |
| 156 | C | B | — |
| 157 | D | C | — |
| 158 | D | D | — |
| 159 | D | D | — |
| 160 | D | D | D |
| 161 | D | D | D |
| 162 | D | D | — |
| 163 | D | D | D |
| 165 | D | B | — |
| 166 | C | C | C |
| 167 | D | D | D |
| 172 | D | D | D |
| 173 | D | C | — |
| 174 | B | A | — |
| 175 | C | C | D |
| 176 | C | B | C |
| 177 | D | D | C |
| 178 | D | D | D |
| 179 | D | C | D |
| 180 | D | D | C |
| 181 | B | A | B |
| 182 | C | A | C |
| 190 | B | B | B |
| 191 | D | D | D |
| 192 | D | D | D |
| 203 | D | D | D |
| 204 | D | D | D |
| 205 | B | A | B |
| 206 | B | A | B |
| 207 | C | B | C |
| 208 | D | B | D |
| 209 | C | A | C |
| 210 | C | B | C |
| 215 | C | A | C |
| 216 | C | A | C |
| 217 | C | B | D |
| 218 | C | C | C |
| 219 | C | A | C |
| 220 | D | D | D |
| 221 | D | B | D |
| 222 | C | B | C |
| 223 | C | B | D |
| 224 | D | B | D |
| 225 | D | D | D |
| 226 | D | B | D |
| 227 | C | B | D |
| 228 | B | B | B |
| 229 | D | D | D |
| 230 | A | A | A |
| 231 | B | A | C |
| 232 | A | A | B |
| 233 | B | A | C |
| 234 | C | A | D |
| 235 | D | B | D |
| 236 | B | A | B |
| 237 | B | A | C |
| 238 | D | D | D |
| 239 | D | C | D |
| 241 | C | C | C |
| 242 | A | A | B |
| 243 | A | A | A |
| 244 | D | B | D |
| 245 | B | A | B |
| 246 | C | C | C |
| 247 | C | A | C |
| 248 | A | A | B |
| 249 | C | C | C |
| 250 | A | A | B |
| 251 | B | A | B |
| 252 | D | B | D |
| 253 | C | B | C |
| 254 | C | C | C |
| 255 | C | B | D |
| 256 | B | A | D |
| 257 | B | A | C |
| 259 | B | B | B |
| 260 | B | B | C |
| 261 | D | C | D |
| 262 | C | A | C |
| 263 | D | D | D |
| 264 | C | B | D |
| 265 | A | A | B |
| 266 | A | A | B |
| 267 | C | A | C |
| 268 | C | A | D |
| 269 | D | C | D |
| 270 | C | B | D |
| 271 | C | B | C |
| 272 | A | A | B |
| 273 | A | — | B |
| 274 | A | A | A |
| 275 | D | — | D |
| 276 | A | A | A |
| 277 | B | A | C |
| 278 | A | A | B |
| 279 | B | A | B |
| 280 | B | A | C |
| 281 | C | B | C |
| 282 | D | C | D |
| 283 | B | A | B |
| 284 | D | C | D |
| 285 | C | A | D |
| 286 | C | B | C |
| 287 | B | A | B |
| 288 | C | C | C |
| 290 | B | B | B |
| 297 | C | A | C |
| 298 | B | A | C |
| 299 | D | D | D |
| 300 | B | A | C |
| 301 | C | C | C |
| 302 | C | B | C |
| 303 | C | B | C |
| 304 | B | A | C |
| 305 | B | — | B |
| 308 | C | B | C |
| 313 | D | B | D |

### EQUIVALENTS AND SCOPE

[0959] This application refers to various issued patents, published patent applications, journal articles, and other publications, all of which are incorporated herein by reference. If there is a conflict between any of the incorporated references and the instant specification, the specification shall control. In addition, any particular embodiment of the present invention that falls within the prior art may be explicitly excluded from any one or more of the claims. Because such embodiments are deemed to be known to one of ordinary skill in the art, they may be excluded even if the exclusion is not set forth explicitly herein. Any particular embodiment of the invention can be excluded from any claim, for any reason, whether or not related to the existence of prior art.

[0960] Those skilled in the art will recognize or be able to ascertain using no more than routine experimentation many equivalents to the specific embodiments described herein. The scope of the present embodiments described herein is not intended to be limited to the above Description, Figures, or Examples but rather is as set forth in the appended claims. Those of ordinary skill in the art will appreciate that various changes and modifications to this description may be made without departing from the spirit or scope of the present invention, as defined in the following claims.

1. A compound of Formula (V): [chemical structure]
or a pharmaceutically acceptable salt, solvate, hydrate, tautomer, or stereoisomer thereof, wherein:
A is cycloalkyl, heterocyclyl, aryl, or heteroaryl, each of which is optionally substituted with one or more R¹;
R^{B} is B, C₁-C₆-alkyl, or C₁-C₆-heteroalkyl, wherein alkyl and heteroalkyl are substituted by one or more R¹⁰;
B is cycloalkyl, heterocyclyl, aryl, or heteroaryl, each of which is optionally substituted with one or more R¹;
each of which is optionally substituted with one or more R¹; each of L¹ and L² is independently absent, C₁-C₆-alkylene, C₁-C₆-heteroalkylene, —O—, —C(O)—, —N(R⁴)—, —N(R⁴)C(O)—, or —C(O)N(R⁴)—, wherein each alkylene and heteroalkylene is optionally substituted with one or more R⁷;
Y is N, C(R^{6a}), or C(R^{6a})(R^{6b}), _{w}hₑrein the dashed lines in the ring comprising Y may be single or double bonds as valency permits;
each R¹ is independently hydrogen, C₁-C₆-alkyl, C₂-C₆-alkenyl, C₂-C₆-alkynyl, C₁-C₆-heteroalkyl, C₁-C₆-haloalkyl, cycloalkyl, heterocyclyl, aryl, C₁-C₆ alkylene-aryl, C₁-C₆ alkenylene-aryl, C₁-C₆ alkylene-heteroaryl, heteroaryl, halo, cyano, oxo, —OR^{A}, —NR^{B}R^{C}, —NR^{B}C(O)R^{D}, —NO₂, —C(O)NR^{B}R^{C}, —C(O)R9^{D}, —C(O)OR^{D}, or —S(O)ₓR^{D}, wherein each alkyl, alkylene, alkenyl, alkynyl, heteroalkyl, haloalkyl, cycloalkyl, heterocyclyl, aryl, and heteroaryl is optionally substituted with one or more R⁵; or
two R¹ groups, together with the atoms to which they are attached, form a 3-7-membered cycloalkyl, heterocyclyl, aryl, or heteroaryl, wherein each cycloalkyl, heterocyclyl, aryl, and heteroaryl is optionally substituted with one or more R⁵;
each R² is independently hydrogen or C₁-C₆-alkyl;
R³ is C₁-C₆-alkyl, C₂-C₆-alkenyl, C₂-C₆-alkynyl, C₁-C₆-heteroalkyl, C₁-C₆-haloalkyl, halo, cyano, —OR^{A}, —NR^{B}R^{C}, —C(O)R^{D}, or —C(O)OR^{D};
R⁴ is hydrogen, C₁-C₆-alkyl, or C₁-C₆-haloalkyl;
each R⁵ is independently C₁-C₆-alkyl, C₂-C₆-alkenyl, C₂-C₆-alkynyl, C₁-C₆-heteroalkyl, C₁-C₆-haloalkyl, cycloalkyl, heterocyclyl, aryl, heteroaryl, halo, oxo, cyano, —OR^{A}, —NR^{B}R^{C}, —NR^{B}C(O)R^{D}, —NO₂, —C(O)NR^{B}R^{C}, —C(O)R^{D}, —C(O)OR^{D}, or —S(O)ₓR^{D}, wherein each alkyl, alkenyl, alkynyl, heteroalkyl, haloalkyl, cycloalkyl, heterocyclyl, aryl, and heteroaryl is optionally substituted with one or more R⁷;
R^{6a} and R^{6b} is independently hydrogen, C₁-C₆-alkyl, C₁-C₆-heteroalkyl, C₁-C₆-haloalkyl, or halo;
each R⁷ is independently C₁-C₆-alkyl, C₁-C₆-heteroalkyl, C₁-C₆-haloalkyl, cycloalkyl, heterocyclyl, aryl, heteroaryl, halo, cyano, oxo, or —OR^{A};
each R^{A}is independently hydrogen, C₁-C₆ alkyl, C₁-C₆ haloalkyl, aryl, heteroaryl, C₁-C₆ alkylene-aryl, C₁-C₆ alkylene-heteroaryl, —C(O)R^{D}, or —S(O)ₓR^{D};
each R^{B} and R^{C} is independently hydrogen, C₁-C₆ alkyl, C₁-C₆ heteroalkyl, cycloalkyl, heterocyclyl, —OR^{A}; or R^{B} and R^{C} together with the atom to which they are attached form a 3-7-membered heterocyclyl ring optionally substituted with one or more R⁹;
each R^{D} is independently hydrogen, C₁-C₆ alkyl, C₂-C₆ alkenyl, C₂-C₆ alkynyl, C₁-C₆ heteroalkyl, C₁-C₆ haloalkyl, cycloalkyl, heterocyclyl, aryl, heteroaryl, C₁-C₆ alkylene-aryl, or C₁-C₆ alkylene-heteroaryl;
each R⁹ and R¹⁰ is independently C₁-C₆-alkyl or halo;
n is 0, 1, or 2;
m is 0, 1, 2, or 3; and
x is 0, 1, or 2.

2. The compound of claim 1, wherein A is a heterocyclyl or heteroaryl.

3. The compound of any one of claims 1-2, wherein A is a nitrogen-containing heterocyclyl or nitrogen-containing heteroaryl.

4. The compound of any one of claims 1-3, The compound of any one of the preceding claims, wherein A is selected from [chemical structure]
wherein R¹ is as described in claim 1.

5. The compound of any one of claims 1-4, wherein A is selected from

[chemical structure]

6. The compound of any one of claims 1-3, wherein A selected from [chemical structure]
wherein R¹ is as described in claim 1.

7. The compound of claim 6, wherein A is selected from

[chemical structure]

8. The compound of any one of claims 1-7, wherein B is a heteroaryl or heterocyclyl.

9. The compound of any one of claims 1-8, wherein B is a nitrogen-containing heteroaryl or nitrogen-containing heterocyclyl.

10. The compound of any one of claims 1-9, wherein B selected from selected from [chemical structure] [chemical structure]
wherein R¹ is as described in claim 1.

11. The compound of any one of claims 49-58, wherein B is selected from

[chemical structure]

12. The compound of any one of claims 1-10, wherein B is selected from [chemical structure]
wherein R¹ is as described in claim 1.

13. The compound of claim 12, wherein B is selected from

[chemical structure]

14. The compound of any one of claims 1-13, wherein each of L¹ and L² is independently absent.

15. The compound of any one of claims 1-15, wherein Y is C(R^{6a}) (e.g., CH) or N.

16. The compound of any one of claims 1-15, wherein R² is hydrogen.

17. The compound of any one of claims 1-16, wherein n is 1 or 2.

18. The compound of any one of claims 1-17, wherein the compound of Formula (V) is a compound of Formula (V-a): [chemical structure]
or a pharmaceutically acceptable salt, solvate, hydrate, tautomer, or stereoisomer thereof, wherein A, B, L¹, L², Y, R², R³, m, n, and subvariables thereof are as defined in claim 1.

19. The compound of any one of claims 1-18, wherein the compound of Formula (V) is a compound of Formula (V-b): [chemical structure]
or a pharmaceutically acceptable salt, solvate, hydrate, tautomer, or stereoisomer thereof, wherein A, B, L¹, R², R³, and subvariables thereof are as defined in claim 1.

20. The compound of any one of claims 1-19, wherein the compound of Formula (V) is a compound of Formula (V-c): [chemical structure]
or a pharmaceutically acceptable salt, solvate, hydrate, tautomer, or stereoisomer thereof, wherein A, B, L¹, R², R³, and subvariables thereof are as defined in claim 1.

21. The compound of any one of claims 1-20, wherein the compound of Formula (V) is a compound of Formula (V-d): [chemical structure]
or a pharmaceutically acceptable salt, solvate, hydrate, tautomer, or stereoisomer thereof, wherein A, B, L¹, R², R³, and subvariables thereof are as defined in claim 1.

22. The compound of any one of claims 1-22, wherein the compound of Formula (V) is a compound listed in Table 5 or a pharmaceutically acceptable salt, solvate, hydrate, tautomer, or stereoisomer thereof.

23. A compound of Formula (I): [chemical structure]
or a pharmaceutically acceptable salt, solvate, hydrate, tautomer, or stereoisomer thereof, wherein:
A and B are each independently cycloalkyl, heterocyclyl, aryl, or heteroaryl, each of which is optionally substituted with one or more R¹;
each of L1 and L2 is independently absent, C₁-C₆-alkylene, C₁-C₆-heteroalkylene, —O—, —C(O)—, —N(R⁸)—, —N(R⁸)C(O)—, or —C(O)N(R⁸)—, wherein each alkylene and heteroalkylene is optionally substituted with one or more R⁹;
each of W, X, and Z is independently C(R³) or N;
Y is N, N(R^{4a}), C(R^{4b}), or C(R^{4b})(R^{4c}), wherein the dashed lines in the ring comprising Y may be single or double bonds as valency permits;
each R¹ is independently hydrogen, C₁-C₆-alkyl, C₂-C₆-alkenyl, C₂-C₆-alkynyl, C₁-C₆-heteroalkyl, C₁-C₆-haloalkyl, cycloalkyl, heterocyclyl, aryl, C₁-C₆ alkylene-aryl, C₁-C₆ alkenylene-aryl, C₁-C₆ alkylene-heteroaryl, heteroaryl, halo, cyano, oxo, —OR^{A}, —NR^{B}R^{C}, NR^{B}C(O)R^{D} —NO₂, —C(O)NR^{B}R^{C}, —C(O)R^{D}, —C(O)OR^{D}, or —S(O)ₓR^{D}, wherein each alkyl, alkylene, alkenyl, alkynyl, heteroalkyl, haloalkyl, cycloalkyl, heterocyclyl, aryl, and heteroaryl is optionally substituted with one or more R⁵; or
two R¹ groups, together with the atoms to which they are attached, form a 3-7-membered cycloalkyl, heterocyclyl, aryl, or heteroaryl, wherein each cycloalkyl, heterocyclyl, aryl, and heteroaryl is optionally substituted with one or more R⁵;
R² is absent, hydrogen, or C₁-C₆-alkyl;
R³ is hydrogen, C₁-C₆-alkyl, C₂-C₆-alkenyl, C₂-C₆-alkynyl, C₁-C₆-heteroalkyl, C₁-C₆-haloalkyl, halo, cyano, —OR^{A}, —NR^{B}R^{C}, —C(O)R^{D}, or —C(O)OR^{D};
R^{4a} is hydrogen, C₁-C₆-alkyl, C₁-C₆-heteroalkyl, or C₁-C₆-haloalkyl;
each of R^{4b} and R^{4c} is independently hydrogen, C₁-C₆-alkyl, C₁-C₆-heteroalkyl, C₁-C₆-haloalkyl, halo, or —OR^{A};
each R⁵ is independently C₁-C₆-alkyl, C₂-C₆-alkenyl, C₂-C₆-alkynyl, C₁-C₆-heteroalkyl, C₁-C₆-haloalkyl, cycloalkyl, heterocyclyl, aryl, heteroaryl, halo, oxo, cyano, —OR^{A}, —NR^{B}R^{C} , —NR^{B}C(O)R^{D}, —NO₂, —C(O)NR^{B}R^{C}, —C(O)R^{D} C(O)OR^{D}, or —S(O)ₓR^{D}, wherein each alkyl, alkenyl, alkynyl, heteroalkyl, haloalkyl, cycloalkyl, heterocyclyl, aryl, and heteroaryl is optionally substituted with one or more R⁶;
each R⁶ is independently C₁-C₆-alkyl, C₁-C₆-heteroalkyl, C₁-C₆-haloalkyl, cycloalkyl, heterocyclyl, aryl, heteroaryl, halo, cyano, oxo, or —OR^{A};
each R⁸ is independently hydrogen, C₁-C₆-alkyl, or C₁-C₆-haloalkyl;
each R⁹ is independently C₁-C₆-alkyl, C₁-C₆-heteroalkyl, C₁-C₆-haloalkyl, cycloalkyl, halo, cyano, oxo, —OR^{A}, —NR^{B}R^{C}, —C(O)R^{D}, or —C(O)OR^{D};
each R^{A}is independently hydrogen, C₁-C₆ alkyl, C₁-C₆ haloalkyl, aryl, heteroaryl, C₁-C₆ alkylene-aryl, C₁-C₆ alkylene-heteroaryl, —C(O)R^{D}, or —S(O)ₓR^{D};
each R^{B} and R^{C} is independently hydrogen, C₁-C₆ alkyl, C₁-C₆ heteroalkyl, cycloalkyl, heterocyclyl, —OR^{A}; or
R^{B} and R^{C} together with the atom to which they are attached form a 3-7-membered heterocyclyl ring optionally substituted with one or more R¹⁰,
each R^{D} is independently hydrogen, C₁-C₆ alkyl, C₂-C₆ alkenyl, C₂-C₆ alkynyl, C₁-C₆ heteroalkyl, C₁-C₆ haloalkyl, cycloalkyl, heterocyclyl, aryl, heteroaryl, C₁-C₆ alkylene-aryl, or C₁-C₆ alkylene-heteroaryl;
each R¹⁰ is independently C₁-C₆-alkyl or halo; and
x is 0, 1, or 2.

24. The compound of claim 23, wherein A is heterocyclyl or heteroaryl.

25. The compound of any one of claims 23-24, wherein A is a nitrogen-containing heterocyclyl or nitrogen-containing heteroaryl.

26. The compound of any one of claims 23-25, wherein A is selected from [chemical structure]
wherein R¹ is as described in claim 23.

27. The compound of claim 26, wherein A is selected from

[chemical structure]

28. The compound of any one of claims 23-25, wherein A selected from [chemical structure] [chemical structure]
wherein R¹ is as described in claim 23.

29. The compound of claim 28, wherein A is selected from

[chemical structure]

[chemical structure]

[chemical structure]

30. The compound of any one of claims 23-29, wherein B is a heterocyclyl or heteroaryl.

31. The compound of any one of claims 23-30, wherein B is a nitrogen-containing heteroaryl or nitrogen-containing heterocyclyl.

32. The compound of any one of claims 23-31, wherein B selected from [chemical structure] [chemical structure] [chemical structure]
wherein R¹ is as described in claim 23.

33. The compound of claim 32, wherein B is selected from

[chemical structure]

34. The compound of any one of claims 23-31, wherein B is selected from [chemical structure]
wherein R¹ is as described in claim 23.

35. The compound of claim 34, wherein A is selected from

[chemical structure]

36. The compound of any one of claims 23-35, wherein each of L¹ and L² is independently absent.

37. The compound of any one of claims 23-36, wherein W is C(R³) (e.g., CH).

38. The compound of any one of claims 23-37, wherein Xis C(R³) (e.g., CH).

39. The compound of any one of claims 23-38, wherein Z is C(R³) (e.g., CH).

40. The compound of any one of claims 23-39, wherein Y is N(R^{4a}) or C(R^{4b}).

41. The compound of any one of claims 23-40, wherein Y is NH.

42. The compound of any one of the preceding claims, wherein R² is absent.

43. The compound of any one of claims 23-42, wherein the compound of Formula (I) is a compound of Formula (I-a): [chemical structure]
or a pharmaceutically acceptable salt, solvate, hydrate, tautomer, or stereoisomer thereof, wherein A, B, L¹, W, X, Z, R^{4a}, and subvariables thereof are as defined in claim 1.

44. The compound of any one of claims 23-43, wherein the compound of Formula (I) is a compound of Formula (I-b): [chemical structure]
or a pharmaceutically acceptable salt, solvate, hydrate, tautomer, or stereoisomer thereof, wherein A, B, L¹, W, X, Z, R^{4a}, and subvariables thereof are as defined in claim 1.

45. The compound of any one of claims 23-44, wherein the compound of Formula (I) is a compound of Formula (I-c): [chemical structure]
or a pharmaceutically acceptable salt, solvate, hydrate, tautomer, or stereoisomer thereof, wherein A, B, Y, R², and subvariables thereof are as defined in claim 1.

46. The compound of any one of the preceding claims, wherein the compound of Formula (I) is a compound listed in Table 1 or a pharmaceutically acceptable salt, solvate, hydrate, tautomer, or stereoisomer thereof.

47. A compound of Formula (III): [chemical structure]
or a pharmaceutically acceptable salt, solvate, hydrate, tautomer, or stereoisomer thereof, wherein:
A and B are each independently cycloalkyl, heterocyclyl, aryl, or heteroaryl, each of which is optionally substituted with one or more R¹;
each of L¹ and L² is independently absent, C₁-C₆-alkylene, C₁-C₆-heteroalkylene, —O—, —C(O)—, —N(R⁸)—, —N(R⁸)C(O)—, or —C(O)N(R⁸)—, wherein each alkylene and heteroalkylene is optionally substituted with one or more R⁹;
each of X and Z is independently C(R³) or N;
Y is N, C, or C(R^{4b}), wherein the dashed lines in the ring comprising Y may be single or double bonds as valency permits;
each R¹ is independently hydrogen, C₁-C₆-alkyl, C₂-C₆-alkenyl, C₂-C₆-alkynyl, C₁-C₆-heteroalkyl, C₁-C₆-haloalkyl, cycloalkyl, heterocyclyl, aryl, C₁-C₆ alkylene-aryl, C₁-C₆ alkenylene-aryl, C₁-C₆ alkylene-heteroaryl, heteroaryl, halo, cyano, oxo, —OR^{A}, —NR^{B}R^{C}, —NR^{B}C(O)R^{D} —NO₂, —C(O)NR^{B}R^{C}, —C(O)R^{D}, C(O)OR^{D}, or —S(O)ₓR^{D}, wherein each alkyl, alkylene, alkenyl, alkynyl, heteroalkyl, haloalkyl, cycloalkyl, heterocyclyl, aryl, and heteroaryl is optionally substituted with one or more R⁵; or
two R¹ groups, together with the atoms to which they are attached, form a 3-7-membered cycloalkyl, heterocyclyl, aryl, or heteroaryl, wherein each cycloalkyl, heterocyclyl, aryl, and heteroaryl is optionally substituted with one or more R⁵;
R² is absent, hydrogen, or C₁-C₆-alkyl;
R³ is hydrogen, C₁-C₆-alkyl, C₂-C₆-alkenyl, C₂-C₆-alkynyl, C₁-C₆-heteroalkyl, C₁-C₆-haloalkyl, halo, cyano, —OR^{A}, —NR^{B}R^{C}, —C(O)R^{D}, or —C(O)OR^{D};
R^{4b} is hydrogen, C₁-C₆-alkyl, C₁-C₆-heteroalkyl, or C₁-C₆-haloalkyl;
each R⁵ is independently C₁-C₆-alkyl, C₂-C₆-alkenyl, C₂-C₆-alkynyl, C₁-C₆₁-heteroalkyl, C₁-C₆-haloalkyl, cycloalkyl, heterocyclyl, aryl, heteroaryl, halo, oxo, cyano, —OR^{A}, —NR^{B}R^{C}, —NR^{B}C(O)R^{D}, —NO₂, —C(O)NR^{B}R^{C}, —C(O)R^{D}, —C(O)OR^{D}, or —S(O)ₓR^{D}, wherein each alkyl, alkenyl, alkynyl, heteroalkyl, haloalkyl, cycloalkyl, heterocyclyl, aryl, and heteroaryl is optionally substituted with one or more R⁶;
each R⁶ is independently C₁-C₆-alkyl, C₁-C₆-heteroalkyl, C₁-C₆-haloalkyl, cycloalkyl, heterocyclyl, aryl, heteroaryl, halo, cyano, oxo, or —OR^{A};
R^{7a} is hydrogen, C₁-C₆-alkyl, C₁-C₆-heteroalkyl, C₁-C₆-haloalkyl, halo, cyano, oxo, or —OR^{A};
R^{7b} is hydrogen, C₁-C₆-alkyl, C₁-C₆-heteroalkyl, C₁-C₆-haloalkyl, halo, cyano, or —OR^{A};
each R⁸ is independently hydrogen, C₁-C₆-alkyl, or C₁-C₆-haloalkyl;
each R⁹ is independently C₁-C₆-alkyl, C₁-C₆-heteroalkyl, C₁-C₆-haloalkyl, cycloalkyl, halo, cyano, oxo, —OR^{A}, —NR^{B}R^{C}, —C(O)R^{D}, or —C(O)OR^{D};
each R^{A}is independently hydrogen, C₁-C₆ alkyl, C₁-C₆ haloalkyl, aryl, heteroaryl, C₁-C₆ alkylene-aryl, C₁-C₆ alkylene-heteroaryl, —C(O)R^{D}, or —S(O)ₓR^{D};
each R^{B} and R^{C} is independently hydrogen, C₁-C₆ alkyl, C₁-C₆ heteroalkyl, cycloalkyl, heterocyclyl, —OR^{A}; or
R^{B} and R^{C} together with the atom to which they are attached form a 3-7-membered heterocyclyl ring optionally substituted with one or more R¹⁰;
each R^{D} is independently hydrogen, C₁-C₆ alkyl, C₂-C₆ alkenyl, C₂-C₆ alkynyl, C₁-C₆ heteroalkyl, C₁-C₆ haloalkyl, cycloalkyl, heterocyclyl, aryl, heteroaryl, C₁-C₆ alkylene-aryl, or C₁-C₆ alkylene-heteroaryl;
each R¹⁰ is independently C₁-C₆-alkyl or halo; and
x is 0, 1, or 2.

48. The compound of claim 47, wherein A is heterocyclyl or heteroaryl.

49. The compound of any one of claims 47-48, wherein A is a nitrogen-containing heterocyclyl or nitrogen-containing heteroaryl.

50. The compound of any one of claims 47-49, wherein A is selected from [chemical structure]
wherein R¹ is as described in claim 47.

51. The compound of claim 50, wherein A is selected from

[chemical structure]

52. The compound of any one of claims 47-49, wherein A selected from [chemical structure] [chemical structure]
wherein R¹ is as described in claim 47.

53. The compound of claim 52, wherein A is selected from

[chemical structure]

54. The compound of any one of claims 47-53, wherein B is a heteroaryl or heterocyclyl.

55. The compound of any one of claims 47-54, wherein B is a nitrogen-containing heteroaryl or nitrogen-containing heterocyclyl.

56. The compound of any one of claims 47-55, wherein B selected from [chemical structure] [chemical structure] [chemical structure]
wherein R¹ is as described in claim 47.

57. The compound of claim 56, wherein B is selected from

[chemical structure]

58. The compound of any one of claims 47-55, wherein B is selected from [chemical structure]
wherein R¹ is as described in claim 47.

59. The compound of claim 58, wherein B is selected from

[chemical structure]

60. The compound of any one of claims 47-59, wherein each of L¹ and L² is independently absent.

61. The compound of any one of claims 47-60, wherein Xis C(R³) (e.g., CH).

62. The compound of any one of claims 47-61, wherein Z is C(R³) (e.g., CH).

63. The compound of any one of claims 47-62, wherein Y is N or C(R^{4b}).

64. The compound of any one of claims 47-63, wherein Y is N.

65. The compound of any one of claims 47-64, wherein R² is absent.

66. The compound of any one of claims 47-65, wherein each of R^{7a} and R^{7b} is independently hydrogen.

67. The compound of any one of claims 47-66, wherein the compound of Formula (III) is a compound of Formula (III-a): [chemical structure]
or a pharmaceutically acceptable salt, solvate, hydrate, tautomer, or stereoisomer thereof, wherein A, B, L¹, X, Z, R^{7a} , R^{7b}, and subvariables thereof are as defined in claim 47.

68. The compound of any one of claims 47-67, wherein the compound of Formula (III) is a compound of Formula (III-b): [chemical structure]
or a pharmaceutically acceptable salt, solvate, hydrate, tautomer, or stereoisomer thereof, wherein A, B, L¹, X, Z, R^{7a} , R^{7b}, and subvariables thereof are as defined in claim 47.

69. The compound of any one of claims 47-68, wherein the compound of Formula (III) is a compound of Formula (III-c): [chemical structure]
or a pharmaceutically acceptable salt, solvate, hydrate, tautomer, or stereoisomer thereof, wherein A, B, Y, R², R^{7a} , R^{7b}, and subvariables thereof are as defined in claim 47.

70. The compound of any one of claims 47-69, wherein the compound of Formula (III) is a compound listed in Table 3 or a pharmaceutically acceptable salt, solvate, hydrate, tautomer, or stereoisomer thereof.

71. A pharmaceutical composition comprising a compound of any one of claims 1-70 and a pharmaceutically acceptable excipient.

72. The compound of any one of claims 1-70 or the pharmaceutical composition of claim 71, wherein the compound alters a target nucleic acid (e.g., an RNA, e.g., a pre-mRNA).

73. The compound of any one of claims 1-70 or the pharmaceutical composition of claim 71, wherein the compound binds to a target nucleic acid (e.g., an RNA, e.g., a pre-mRNA).

74. The compound of any one of claims 1-70 or the pharmaceutical composition of claim 71, wherein the compound stabilizes a target nucleic acid (e.g., an RNA, e.g., a pre-mRNA).

75. The compound of any one of claims 1-70 or the pharmaceutical composition of claim 71, wherein the compound increases splicing at splice site on a target nucleic acid (e.g., an RNA, e.g., a pre-mRNA), by about 0.5%, 1%, 2%, 3%, 4%, 5%, 6%, 7%, 8%, 9%, 10%, 15%, 20%, 25%, 30%, 35%, 40%, 45%, 50%, 55%, 60%, 65%, 70%, 75%, 80%, 85%, 90%, 95%, or more, e.g., as determined by qPCR.

76. The compound of any one of claims 1-70 or the pharmaceutical composition of claim 71, wherein the compound decreases splicing at splice site on a target nucleic acid (e.g., an RNA, e.g., a pre-mRNA), by about 0.5%, 1%, 2%, 3%, 4%, 5%, 6%, 7%, 8%, 9%, 10%, 15%, 20%, 25%, 30%, 35%, 40%, 45%, 50%, 55%, 60%, 65%, 70%, 75%, 80%, 85%, 90%, 95%, or more, e.g., as determined by qPCR %.

77. A method of modulating splicing of a nucleic acid (e.g., DNA, RNA, e.g., a pre-mRNA) comprising contacting the nucleic acid with a compound of Formula (I), Formula (III), or Formula (V), according to any one of claims 1-70 or the pharmaceutical composition of claim

71.

78. The method of claim 77, wherein the compound increases splicing at splice site on a target nucleic acid (e.g., an RNA, e.g., a pre-mRNA), by about 0.5%, 1%, 2%, 3%, 4%, 5%, 6%, 7%, 8%, 9%, 10%, 15%, 20%, 25%, 30%, 35%, 40%, 45%, 50%, 55%, 60%, 65%, 70%, 75%, 80%, 85%, 90%, 95%, or more, e.g., as determined by qPCR.

79. The method of claim 77, wherein the compound decreases splicing at splice site on a target nucleic acid (e.g., an RNA, e.g., a pre-mRNA), by about 0.5%, 1%, 2%, 3%, 4%, 5%, 6%, 7%, 8%, 9%, 10%, 15%, 20%, 25%, 30%, 35%, 40%, 45%, 50%, 55%, 60%, 65%, 70%, 75%, 80%, 85%, 90%, 95%, or more, e.g., as determined by qPCR.

80. A method of forming a complex comprising a component of a spliceosome (e.g., a major spliceosome component or a minor spliceosome component), a nucleic acid (e.g., a DNA, RNA, e.g., a pre-mRNA), and a compound of Formula (I), Formula (III), or Formula (V):
comprising contacting the nucleic acid (e.g., a DNA, RNA, e.g., a pre-mRNA) with a compound of Formula (I), Formula (III), or Formula (V), according to any one of claims 1-70 or the pharmaceutical composition of claim 71.

81. The method of claim 80, wherein the component of a spliceosome is recruited to the nucleic acid in the presence of the compound of Formula (I), Formula (III), or Formula (V).

82. A method of altering the conformation of a nucleic acid (e.g., a DNA, RNA, e.g., a pre-mRNA) comprising contacting the nucleic acid with a compound of Formula (I), (III), or (V), according to any one of claims 1-70 or the pharmaceutical composition of claim 71.

83. The method of claim 82, wherein the altering comprises forming a bulge in the nucleic acid.

84. The method of claim 82, wherein the altering comprises stabilizing a bulge in the nucleic acid.

85. The method of claim 82, wherein the altering comprises reducing a bulge in the nucleic acid.

86. The method of any one of claims 82-85, wherein the nucleic acid comprises a splice site.

87. A method of treating a disease or disorder in a subject comprising administering to the subject a compound of Formula (I), Formula (III), or Formula (V) according to any one of claims 1-70 or the pharmaceutical composition of claim 71.

88. The method of claim 87, wherein the disease or disorder comprises a proliferative disease (e.g., cancer, a benign neoplasm, or angiogenesis).

89. The method of any one of claims 87-88, wherein the disease or disorder comprises a non-proliferative disease (e.g., a neurological disease, autoimmune disorder, immunodeficiency disorder, lysosomal storage disease, cardiovascular condition, metabolic disorder, respiratory condition, renal disease, or infectious disease).

The application's sequence listing, which the Patent Office published only in electronic form, follows.

SEQUENCE LISTING (5533 sequences)

SEQ ID NO: 1 - RNA, 10 nt, Unknown
  source: /note="Description of Unknown: Exemplary gene or splice site sequence"
aaagcaaguu

SEQ ID NO: 2 - RNA, 10 nt, Unknown
  source: /note="Description of Unknown: Exemplary gene or splice site sequence"
aaaguaaaaa

SEQ ID NO: 3 - RNA, 10 nt, Unknown
  source: /note="Description of Unknown: Exemplary gene or splice site sequence"
aaaguaaaau

SEQ ID NO: 4 - RNA, 10 nt, Unknown
  source: /note="Description of Unknown: Exemplary gene or splice site sequence"
aaaguaaagu

SEQ ID NO: 5 - RNA, 10 nt, Unknown
  source: /note="Description of Unknown: Exemplary gene or splice site sequence"
aaaguaaaua

SEQ ID NO: 6 - RNA, 10 nt, Unknown
  source: /note="Description of Unknown: Exemplary gene or splice site sequence"
aaaguaaaug

SEQ ID NO: 7 - RNA, 10 nt, Unknown
  source: /note="Description of Unknown: Exemplary gene or splice site sequence"
aaaguaaauu

SEQ ID NO: 8 - RNA, 10 nt, Unknown
  source: /note="Description of Unknown: Exemplary gene or splice site sequence"
aaaguaacac

SEQ ID NO: 9 - RNA, 10 nt, Unknown
  source: /note="Description of Unknown: Exemplary gene or splice site sequence"
aaaguaacca

SEQ ID NO: 10 - RNA, 10 nt, Unknown
  source: /note="Description of Unknown: Exemplary gene or splice site sequence"
aaaguaacuu

SEQ ID NO: 11 - RNA, 10 nt, Unknown
  source: /note="Description of Unknown: Exemplary gene or splice site sequence"
aaaguaagaa

SEQ ID NO: 12 - RNA, 10 nt, Unknown
  source: /note="Description of Unknown: Exemplary gene or splice site sequence"
aaaguaagac

SEQ ID NO: 13 - RNA, 10 nt, Unknown
  source: /note="Description of Unknown: Exemplary gene or splice site sequence"
aaaguaagag

SEQ ID NO: 14 - RNA, 10 nt, Unknown
  source: /note="Description of Unknown: Exemplary gene or splice site sequence"
aaaguaagau

SEQ ID NO: 15 - RNA, 10 nt, Unknown
  source: /note="Description of Unknown: Exemplary gene or splice site sequence"
aaaguaagca

SEQ ID NO: 16 - RNA, 10 nt, Unknown
  source: /note="Description of Unknown: Exemplary gene or splice site sequence"
aaaguaagcc

SEQ ID NO: 17 - RNA, 10 nt, Unknown
  source: /note="Description of Unknown: Exemplary gene or splice site sequence"
aaaguaagcu

SEQ ID NO: 18 - RNA, 10 nt, Unknown
  source: /note="Description of Unknown: Exemplary gene or splice site sequence"
aaaguaagga

SEQ ID NO: 19 - RNA, 10 nt, Unknown
  source: /note="Description of Unknown: Exemplary gene or splice site sequence"
aaaguaaggg

SEQ ID NO: 20 - RNA, 10 nt, Unknown
  source: /note="Description of Unknown: Exemplary gene or splice site sequence"
aaaguaaggu

SEQ ID NO: 21 - RNA, 10 nt, Unknown
  source: /note="Description of Unknown: Exemplary gene or splice site sequence"
aaaguaagua

SEQ ID NO: 22 - RNA, 10 nt, Unknown
  source: /note="Description of Unknown: Exemplary gene or splice site sequence"
aaaguaaguc

SEQ ID NO: 23 - RNA, 10 nt, Unknown
  source: /note="Description of Unknown: Exemplary gene or splice site sequence"
aaaguaagug

SEQ ID NO: 24 - RNA, 10 nt, Unknown
  source: /note="Description of Unknown: Exemplary gene or splice site sequence"
aaaguaaguu

SEQ ID NO: 25 - RNA, 10 nt, Unknown
  source: /note="Description of Unknown: Exemplary gene or splice site sequence"
aaaguaaucu

SEQ ID NO: 26 - RNA, 10 nt, Unknown
  source: /note="Description of Unknown: Exemplary gene or splice site sequence"
aaaguaauua

SEQ ID NO: 27 - RNA, 10 nt, Unknown
  source: /note="Description of Unknown: Exemplary gene or splice site sequence"
aaaguacaaa

SEQ ID NO: 28 - RNA, 10 nt, Unknown
  source: /note="Description of Unknown: Exemplary gene or splice site sequence"
aaaguaccgg

SEQ ID NO: 29 - RNA, 10 nt, Unknown
  source: /note="Description of Unknown: Exemplary gene or splice site sequence"
aaaguacuag

SEQ ID NO: 30 - RNA, 10 nt, Unknown
  source: /note="Description of Unknown: Exemplary gene or splice site sequence"
aaaguacugg

SEQ ID NO: 31 - RNA, 10 nt, Unknown
  source: /note="Description of Unknown: Exemplary gene or splice site sequence"
aaaguacuuc

SEQ ID NO: 32 - RNA, 10 nt, Unknown
  source: /note="Description of Unknown: Exemplary gene or splice site sequence"
aaaguacuug

SEQ ID NO: 33 - RNA, 10 nt, Unknown
  source: /note="Description of Unknown: Exemplary gene or splice site sequence"
aaaguagcuu

SEQ ID NO: 34 - RNA, 10 nt, Unknown
  source: /note="Description of Unknown: Exemplary gene or splice site sequence"
aaaguaggag

SEQ ID NO: 35 - RNA, 10 nt, Unknown
  source: /note="Description of Unknown: Exemplary gene or splice site sequence"
aaaguaggau

SEQ ID NO: 36 - RNA, 10 nt, Unknown
  source: /note="Description of Unknown: Exemplary gene or splice site sequence"
aaaguagggg

SEQ ID NO: 37 - RNA, 10 nt, Unknown
  source: /note="Description of Unknown: Exemplary gene or splice site sequence"
aaaguaggua

SEQ ID NO: 38 - RNA, 10 nt, Unknown
  source: /note="Description of Unknown: Exemplary gene or splice site sequence"
aaaguaguaa

SEQ ID NO: 39 - RNA, 10 nt, Unknown
  source: /note="Description of Unknown: Exemplary gene or splice site sequence"
aaaguauauu

SEQ ID NO: 40 - RNA, 10 nt, Unknown
  source: /note="Description of Unknown: Exemplary gene or splice site sequence"
aaaguauccu

SEQ ID NO: 41 - RNA, 10 nt, Unknown
  source: /note="Description of Unknown: Exemplary gene or splice site sequence"
aaaguaucuc

SEQ ID NO: 42 - RNA, 10 nt, Unknown
  source: /note="Description of Unknown: Exemplary gene or splice site sequence"
aaaguaugga

SEQ ID NO: 43 - RNA, 10 nt, Unknown
  source: /note="Description of Unknown: Exemplary gene or splice site sequence"
aaaguaugua

SEQ ID NO: 44 - RNA, 10 nt, Unknown
  source: /note="Description of Unknown: Exemplary gene or splice site sequence"
aaaguaugug

SEQ ID NO: 45 - RNA, 10 nt, Unknown
  source: /note="Description of Unknown: Exemplary gene or splice site sequence"
aaaguauguu

SEQ ID NO: 46 - RNA, 10 nt, Unknown
  source: /note="Description of Unknown: Exemplary gene or splice site sequence"
aaaguauugg

SEQ ID NO: 47 - RNA, 10 nt, Unknown
  source: /note="Description of Unknown: Exemplary gene or splice site sequence"
aaaguauuuu

SEQ ID NO: 48 - RNA, 10 nt, Unknown
  source: /note="Description of Unknown: Exemplary gene or splice site sequence"
aaagucagau

SEQ ID NO: 49 - RNA, 10 nt, Unknown
  source: /note="Description of Unknown: Exemplary gene or splice site sequence"
aaagucugag

SEQ ID NO: 50 - RNA, 10 nt, Unknown
  source: /note="Description of Unknown: Exemplary gene or splice site sequence"
aaagugaaua

SEQ ID NO: 51 - RNA, 10 nt, Unknown
  source: /note="Description of Unknown: Exemplary gene or splice site sequence"
aaagugagaa

SEQ ID NO: 52 - RNA, 10 nt, Unknown
  source: /note="Description of Unknown: Exemplary gene or splice site sequence"
aaagugagac

SEQ ID NO: 53 - RNA, 10 nt, Unknown
  source: /note="Description of Unknown: Exemplary gene or splice site sequence"
aaagugagag

SEQ ID NO: 54 - RNA, 10 nt, Unknown
  source: /note="Description of Unknown: Exemplary gene or splice site sequence"
aaagugagau

SEQ ID NO: 55 - RNA, 10 nt, Unknown
  source: /note="Description of Unknown: Exemplary gene or splice site sequence"
aaagugagca

SEQ ID NO: 56 - RNA, 10 nt, Unknown
  source: /note="Description of Unknown: Exemplary gene or splice site sequence"
aaagugagcu

SEQ ID NO: 57 - RNA, 10 nt, Unknown
  source: /note="Description of Unknown: Exemplary gene or splice site sequence"
aaagugaggg

SEQ ID NO: 58 - RNA, 10 nt, Unknown
  source: /note="Description of Unknown: Exemplary gene or splice site sequence"
aaagugagua

SEQ ID NO: 59 - RNA, 10 nt, Unknown
  source: /note="Description of Unknown: Exemplary gene or splice site sequence"
aaagugaguc

SEQ ID NO: 60 - RNA, 10 nt, Unknown
  source: /note="Description of Unknown: Exemplary gene or splice site sequence"
aaagugagug

SEQ ID NO: 61 - RNA, 10 nt, Unknown
  source: /note="Description of Unknown: Exemplary gene or splice site sequence"
aaagugaguu

SEQ ID NO: 62 - RNA, 10 nt, Unknown
  source: /note="Description of Unknown: Exemplary gene or splice site sequence"
aaagugcguc

SEQ ID NO: 63 - RNA, 10 nt, Unknown
  source: /note="Description of Unknown: Exemplary gene or splice site sequence"
aaagugcuga

SEQ ID NO: 64 - RNA, 10 nt, Unknown
  source: /note="Description of Unknown: Exemplary gene or splice site sequence"
aaaguggguc

SEQ ID NO: 65 - RNA, 10 nt, Unknown
  source: /note="Description of Unknown: Exemplary gene or splice site sequence"
aaaguggguu

SEQ ID NO: 66 - RNA, 10 nt, Unknown
  source: /note="Description of Unknown: Exemplary gene or splice site sequence"
aaagugguaa

SEQ ID NO: 67 - RNA, 10 nt, Unknown
  source: /note="Description of Unknown: Exemplary gene or splice site sequence"
aaaguguaug

SEQ ID NO: 68 - RNA, 10 nt, Unknown
  source: /note="Description of Unknown: Exemplary gene or splice site sequence"
aaagugugug

SEQ ID NO: 69 - RNA, 10 nt, Unknown
  source: /note="Description of Unknown: Exemplary gene or splice site sequence"
aaaguguguu

SEQ ID NO: 70 - RNA, 10 nt, Unknown
  source: /note="Description of Unknown: Exemplary gene or splice site sequence"
aaaguuaagu

SEQ ID NO: 71 - RNA, 10 nt, Unknown
  source: /note="Description of Unknown: Exemplary gene or splice site sequence"
aaaguuacuu

SEQ ID NO: 72 - RNA, 10 nt, Unknown
  source: /note="Description of Unknown: Exemplary gene or splice site sequence"
aaaguuagug

SEQ ID NO: 73 - RNA, 10 nt, Unknown
  source: /note="Description of Unknown: Exemplary gene or splice site sequence"
aaaguuaugu

SEQ ID NO: 74 - RNA, 10 nt, Unknown
  source: /note="Description of Unknown: Exemplary gene or splice site sequence"
aaaguugagu

SEQ ID NO: 75 - RNA, 10 nt, Unknown
  source: /note="Description of Unknown: Exemplary gene or splice site sequence"
aaaguuugua

SEQ ID NO: 76 - RNA, 10 nt, Unknown
  source: /note="Description of Unknown: Exemplary gene or splice site sequence"
aacguaaaac

SEQ ID NO: 77 - RNA, 10 nt, Unknown
  source: /note="Description of Unknown: Exemplary gene or splice site sequence"
aacguaaagc

SEQ ID NO: 78 - RNA, 10 nt, Unknown
  source: /note="Description of Unknown: Exemplary gene or splice site sequence"
aacguaaagg

SEQ ID NO: 79 - RNA, 10 nt, Unknown
  source: /note="Description of Unknown: Exemplary gene or splice site sequence"
aacguaagca

SEQ ID NO: 80 - RNA, 10 nt, Unknown
  source: /note="Description of Unknown: Exemplary gene or splice site sequence"
aacguaaggg

SEQ ID NO: 81 - RNA, 10 nt, Unknown
  source: /note="Description of Unknown: Exemplary gene or splice site sequence"
aacguaaguc

SEQ ID NO: 82 - RNA, 10 nt, Unknown
  source: /note="Description of Unknown: Exemplary gene or splice site sequence"
aacguaagug

SEQ ID NO: 83 - RNA, 10 nt, Unknown
  source: /note="Description of Unknown: Exemplary gene or splice site sequence"
aacguaaugg

SEQ ID NO: 84 - RNA, 10 nt, Unknown
  source: /note="Description of Unknown: Exemplary gene or splice site sequence"
aacguaguga

SEQ ID NO: 85 - RNA, 10 nt, Unknown
  source: /note="Description of Unknown: Exemplary gene or splice site sequence"
aacguaugua

SEQ ID NO: 86 - RNA, 10 nt, Unknown
  source: /note="Description of Unknown: Exemplary gene or splice site sequence"
aacguauguu

SEQ ID NO: 87 - RNA, 10 nt, Unknown
  source: /note="Description of Unknown: Exemplary gene or splice site sequence"
aacgugagca

SEQ ID NO: 88 - RNA, 10 nt, Unknown
  source: /note="Description of Unknown: Exemplary gene or splice site sequence"
aacgugagga

SEQ ID NO: 89 - RNA, 10 nt, Unknown
  source: /note="Description of Unknown: Exemplary gene or splice site sequence"
aacgugauuu

SEQ ID NO: 90 - RNA, 10 nt, Unknown
  source: /note="Description of Unknown: Exemplary gene or splice site sequence"
aacgugggau

SEQ ID NO: 91 - RNA, 10 nt, Unknown
  source: /note="Description of Unknown: Exemplary gene or splice site sequence"
aacgugggua

SEQ ID NO: 92 - RNA, 10 nt, Unknown
  source: /note="Description of Unknown: Exemplary gene or splice site sequence"
aacguguguu

SEQ ID NO: 93 - RNA, 10 nt, Unknown
  source: /note="Description of Unknown: Exemplary gene or splice site sequence"
aacguuggua

SEQ ID NO: 94 - RNA, 10 nt, Unknown
  source: /note="Description of Unknown: Exemplary gene or splice site sequence"
aaggcaaauu

SEQ ID NO: 95 - RNA, 10 nt, Unknown
  source: /note="Description of Unknown: Exemplary gene or splice site sequence"
aaggcaagag

SEQ ID NO: 96 - RNA, 10 nt, Unknown
  source: /note="Description of Unknown: Exemplary gene or splice site sequence"
aaggcaagau

SEQ ID NO: 97 - RNA, 10 nt, Unknown
  source: /note="Description of Unknown: Exemplary gene or splice site sequence"
aaggcaagcc

SEQ ID NO: 98 - RNA, 10 nt, Unknown
  source: /note="Description of Unknown: Exemplary gene or splice site sequence"
aaggcaagga

SEQ ID NO: 99 - RNA, 10 nt, Unknown
  source: /note="Description of Unknown: Exemplary gene or splice site sequence"
aaggcaaggg

SEQ ID NO: 100 - RNA, 10 nt, Unknown
  source: /note="Description of Unknown: Exemplary gene or splice site sequence"
aaggcaagug

SEQ ID NO: 101 - RNA, 10 nt, Unknown
  source: /note="Description of Unknown: Exemplary gene or splice site sequence"
aaggcaaguu

SEQ ID NO: 102 - RNA, 10 nt, Unknown
  source: /note="Description of Unknown: Exemplary gene or splice site sequence"
aaggcacugc

SEQ ID NO: 103 - RNA, 10 nt, Unknown
  source: /note="Description of Unknown: Exemplary gene or splice site sequence"
aaggcagaaa

SEQ ID NO: 104 - RNA, 10 nt, Unknown
  source: /note="Description of Unknown: Exemplary gene or splice site sequence"
aaggcaggau

SEQ ID NO: 105 - RNA, 10 nt, Unknown
  source: /note="Description of Unknown: Exemplary gene or splice site sequence"
aaggcaggca

SEQ ID NO: 106 - RNA, 10 nt, Unknown
  source: /note="Description of Unknown: Exemplary gene or splice site sequence"
aaggcaggga

SEQ ID NO: 107 - RNA, 10 nt, Unknown
  source: /note="Description of Unknown: Exemplary gene or splice site sequence"
aaggcagggg

SEQ ID NO: 108 - RNA, 10 nt, Unknown
  source: /note="Description of Unknown: Exemplary gene or splice site sequence"
aaggcaggua

SEQ ID NO: 109 - RNA, 10 nt, Unknown
  source: /note="Description of Unknown: Exemplary gene or splice site sequence"
aaggcaggug

SEQ ID NO: 110 - RNA, 10 nt, Unknown
  source: /note="Description of Unknown: Exemplary gene or splice site sequence"
aaggcaucuc

SEQ ID NO: 111 - RNA, 10 nt, Unknown
  source: /note="Description of Unknown: Exemplary gene or splice site sequence"
aaggcaugcu

SEQ ID NO: 112 - RNA, 10 nt, Unknown
  source: /note="Description of Unknown: Exemplary gene or splice site sequence"
aaggcaugga

SEQ ID NO: 113 - RNA, 10 nt, Unknown
  source: /note="Description of Unknown: Exemplary gene or splice site sequence"
aaggcauguu

SEQ ID NO: 114 - RNA, 10 nt, Unknown
  source: /note="Description of Unknown: Exemplary gene or splice site sequence"
aaggcauuau

SEQ ID NO: 115 - RNA, 10 nt, Unknown
  source: /note="Description of Unknown: Exemplary gene or splice site sequence"
aaggcgagcu

SEQ ID NO: 116 - RNA, 10 nt, Unknown
  source: /note="Description of Unknown: Exemplary gene or splice site sequence"
aaggcgaguc

SEQ ID NO: 117 - RNA, 10 nt, Unknown
  source: /note="Description of Unknown: Exemplary gene or splice site sequence"
aaggcgaguu

SEQ ID NO: 118 - RNA, 10 nt, Unknown
  source: /note="Description of Unknown: Exemplary gene or splice site sequence"
aaggcuagcc

SEQ ID NO: 119 - RNA, 10 nt, Unknown
  source: /note="Description of Unknown: Exemplary gene or splice site sequence"
aagguaaaaa

SEQ ID NO: 120 - RNA, 10 nt, Unknown
  source: /note="Description of Unknown: Exemplary gene or splice site sequence"
aagguaaaac

SEQ ID NO: 121 - RNA, 10 nt, Unknown
  source: /note="Description of Unknown: Exemplary gene or splice site sequence"
aagguaaaag

SEQ ID NO: 122 - RNA, 10 nt, Unknown
  source: /note="Description of Unknown: Exemplary gene or splice site sequence"
aagguaaaau

SEQ ID NO: 123 - RNA, 10 nt, Unknown
  source: /note="Description of Unknown: Exemplary gene or splice site sequence"
aagguaaaca

SEQ ID NO: 124 - RNA, 10 nt, Unknown
  source: /note="Description of Unknown: Exemplary gene or splice site sequence"
aagguaaacc

SEQ ID NO: 125 - RNA, 10 nt, Unknown
  source: /note="Description of Unknown: Exemplary gene or splice site sequence"
aagguaaacu

SEQ ID NO: 126 - RNA, 10 nt, Unknown
  source: /note="Description of Unknown: Exemplary gene or splice site sequence"
aagguaaaga

SEQ ID NO: 127 - RNA, 10 nt, Unknown
  source: /note="Description of Unknown: Exemplary gene or splice site sequence"
aagguaaagc

SEQ ID NO: 128 - RNA, 10 nt, Unknown
  source: /note="Description of Unknown: Exemplary gene or splice site sequence"
aagguaaagg

SEQ ID NO: 129 - RNA, 10 nt, Unknown
  source: /note="Description of Unknown: Exemplary gene or splice site sequence"
aagguaaagu

SEQ ID NO: 130 - RNA, 10 nt, Unknown
  source: /note="Description of Unknown: Exemplary gene or splice site sequence"
aagguaaaua

SEQ ID NO: 131 - RNA, 10 nt, Unknown
  source: /note="Description of Unknown: Exemplary gene or splice site sequence"
aagguaaauc

SEQ ID NO: 132 - RNA, 10 nt, Unknown
  source: /note="Description of Unknown: Exemplary gene or splice site sequence"
aagguaaaug

SEQ ID NO: 133 - RNA, 10 nt, Unknown
  source: /note="Description of Unknown: Exemplary gene or splice site sequence"
aagguaaauu

SEQ ID NO: 134 - RNA, 10 nt, Unknown
  source: /note="Description of Unknown: Exemplary gene or splice site sequence"
aagguaacaa

SEQ ID NO: 135 - RNA, 10 nt, Unknown
  source: /note="Description of Unknown: Exemplary gene or splice site sequence"
aagguaacau

SEQ ID NO: 136 - RNA, 10 nt, Unknown
  source: /note="Description of Unknown: Exemplary gene or splice site sequence"
aagguaaccc

SEQ ID NO: 137 - RNA, 10 nt, Unknown
  source: /note="Description of Unknown: Exemplary gene or splice site sequence"
aagguaacua

SEQ ID NO: 138 - RNA, 10 nt, Unknown
  source: /note="Description of Unknown: Exemplary gene or splice site sequence"
aagguaacuc

SEQ ID NO: 139 - RNA, 10 nt, Unknown
  source: /note="Description of Unknown: Exemplary gene or splice site sequence"
aagguaacug

SEQ ID NO: 140 - RNA, 10 nt, Unknown
  source: /note="Description of Unknown: Exemplary gene or splice site sequence"
aagguaacuu

SEQ ID NO: 141 - RNA, 10 nt, Unknown
  source: /note="Description of Unknown: Exemplary gene or splice site sequence"
aagguaagaa

SEQ ID NO: 142 - RNA, 10 nt, Unknown
  source: /note="Description of Unknown: Exemplary gene or splice site sequence"
aagguaagac

SEQ ID NO: 143 - RNA, 10 nt, Unknown
  source: /note="Description of Unknown: Exemplary gene or splice site sequence"
aagguaagag

SEQ ID NO: 144 - RNA, 10 nt, Unknown
  source: /note="Description of Unknown: Exemplary gene or splice site sequence"
aagguaagau

SEQ ID NO: 145 - RNA, 10 nt, Unknown
  source: /note="Description of Unknown: Exemplary gene or splice site sequence"
aagguaagca

SEQ ID NO: 146 - RNA, 10 nt, Unknown
  source: /note="Description of Unknown: Exemplary gene or splice site sequence"
aagguaagcc

SEQ ID NO: 147 - RNA, 10 nt, Unknown
  source: /note="Description of Unknown: Exemplary gene or splice site sequence"
aagguaagcg

SEQ ID NO: 148 - RNA, 10 nt, Unknown
  source: /note="Description of Unknown: Exemplary gene or splice site sequence"
aagguaagcu

SEQ ID NO: 149 - RNA, 10 nt, Unknown
  source: /note="Description of Unknown: Exemplary gene or splice site sequence"
aagguaagga

SEQ ID NO: 150 - RNA, 10 nt, Unknown
  source: /note="Description of Unknown: Exemplary gene or splice site sequence"
aagguaaggc

SEQ ID NO: 151 - RNA, 10 nt, Unknown
  source: /note="Description of Unknown: Exemplary gene or splice site sequence"
aagguaaggg

SEQ ID NO: 152 - RNA, 10 nt, Unknown
  source: /note="Description of Unknown: Exemplary gene or splice site sequence"
aagguaaggu

SEQ ID NO: 153 - RNA, 10 nt, Unknown
  source: /note="Description of Unknown: Exemplary gene or splice site sequence"
aagguaagua

SEQ ID NO: 154 - RNA, 10 nt, Unknown
  source: /note="Description of Unknown: Exemplary gene or splice site sequence"
aagguaaguc

SEQ ID NO: 155 - RNA, 10 nt, Unknown
  source: /note="Description of Unknown: Exemplary gene or splice site sequence"
aagguaagug

SEQ ID NO: 156 - RNA, 10 nt, Unknown
  source: /note="Description of Unknown: Exemplary gene or splice site sequence"
aagguaaguu

SEQ ID NO: 157 - RNA, 10 nt, Unknown
  source: /note="Description of Unknown: Exemplary gene or splice site sequence"
aagguaauaa

SEQ ID NO: 158 - RNA, 10 nt, Unknown
  source: /note="Description of Unknown: Exemplary gene or splice site sequence"
aagguaauac

SEQ ID NO: 159 - RNA, 10 nt, Unknown
  source: /note="Description of Unknown: Exemplary gene or splice site sequence"
aagguaauag

SEQ ID NO: 160 - RNA, 10 nt, Unknown
  source: /note="Description of Unknown: Exemplary gene or splice site sequence"
aagguaauau

SEQ ID NO: 161 - RNA, 10 nt, Unknown
  source: /note="Description of Unknown: Exemplary gene or splice site sequence"
aagguaauca

SEQ ID NO: 162 - RNA, 10 nt, Unknown
  source: /note="Description of Unknown: Exemplary gene or splice site sequence"
aagguaaucc

SEQ ID NO: 163 - RNA, 10 nt, Unknown
  source: /note="Description of Unknown: Exemplary gene or splice site sequence"
aagguaaucu

SEQ ID NO: 164 - RNA, 10 nt, Unknown
  source: /note="Description of Unknown: Exemplary gene or splice site sequence"
aagguaauga

SEQ ID NO: 165 - RNA, 10 nt, Unknown
  source: /note="Description of Unknown: Exemplary gene or splice site sequence"
aagguaaugc

SEQ ID NO: 166 - RNA, 10 nt, Unknown
  source: /note="Description of Unknown: Exemplary gene or splice site sequence"
aagguaaugg

SEQ ID NO: 167 - RNA, 10 nt, Unknown
  source: /note="Description of Unknown: Exemplary gene or splice site sequence"
aagguaaugu

SEQ ID NO: 168 - RNA, 10 nt, Unknown
  source: /note="Description of Unknown: Exemplary gene or splice site sequence"
aagguaauua

SEQ ID NO: 169 - RNA, 10 nt, Unknown
  source: /note="Description of Unknown: Exemplary gene or splice site sequence"
aagguaauuc

SEQ ID NO: 170 - RNA, 10 nt, Unknown
  source: /note="Description of Unknown: Exemplary gene or splice site sequence"
aagguaauug

SEQ ID NO: 171 - RNA, 10 nt, Unknown
  source: /note="Description of Unknown: Exemplary gene or splice site sequence"
aagguaauuu

SEQ ID NO: 172 - RNA, 10 nt, Unknown
  source: /note="Description of Unknown: Exemplary gene or splice site sequence"
aagguacaaa

SEQ ID NO: 173 - RNA, 10 nt, Unknown
  source: /note="Description of Unknown: Exemplary gene or splice site sequence"
aagguacaag

SEQ ID NO: 174 - RNA, 10 nt, Unknown
  source: /note="Description of Unknown: Exemplary gene or splice site sequence"
aagguacaau

SEQ ID NO: 175 - RNA, 10 nt, Unknown
  source: /note="Description of Unknown: Exemplary gene or splice site sequence"
aagguacacc

SEQ ID NO: 176 - RNA, 10 nt, Unknown
  source: /note="Description of Unknown: Exemplary gene or splice site sequence"
aagguacacu

SEQ ID NO: 177 - RNA, 10 nt, Unknown
  source: /note="Description of Unknown: Exemplary gene or splice site sequence"
aagguacagg

SEQ ID NO: 178 - RNA, 10 nt, Unknown
  source: /note="Description of Unknown: Exemplary gene or splice site sequence"
aagguacagu

SEQ ID NO: 179 - RNA, 10 nt, Unknown
  source: /note="Description of Unknown: Exemplary gene or splice site sequence"
aagguacaua

SEQ ID NO: 180 - RNA, 10 nt, Unknown
  source: /note="Description of Unknown: Exemplary gene or splice site sequence"
aagguacaug

SEQ ID NO: 181 - RNA, 10 nt, Unknown
  source: /note="Description of Unknown: Exemplary gene or splice site sequence"
aagguacauu

SEQ ID NO: 182 - RNA, 10 nt, Unknown
  source: /note="Description of Unknown: Exemplary gene or splice site sequence"
aagguaccaa

SEQ ID NO: 183 - RNA, 10 nt, Unknown
  source: /note="Description of Unknown: Exemplary gene or splice site sequence"
aagguaccag

SEQ ID NO: 184 - RNA, 10 nt, Unknown
  source: /note="Description of Unknown: Exemplary gene or splice site sequence"
aagguaccca

SEQ ID NO: 185 - RNA, 10 nt, Unknown
  source: /note="Description of Unknown: Exemplary gene or splice site sequence"
aagguacccu

SEQ ID NO: 186 - RNA, 10 nt, Unknown
  source: /note="Description of Unknown: Exemplary gene or splice site sequence"
aagguaccuc

SEQ ID NO: 187 - RNA, 10 nt, Unknown
  source: /note="Description of Unknown: Exemplary gene or splice site sequence"
aagguaccug

SEQ ID NO: 188 - RNA, 10 nt, Unknown
  source: /note="Description of Unknown: Exemplary gene or splice site sequence"
aagguaccuu

SEQ ID NO: 189 - RNA, 10 nt, Unknown
  source: /note="Description of Unknown: Exemplary gene or splice site sequence"
aagguacgaa

SEQ ID NO: 190 - RNA, 10 nt, Unknown
  source: /note="Description of Unknown: Exemplary gene or splice site sequence"
aagguacggg

SEQ ID NO: 191 - RNA, 10 nt, Unknown
  source: /note="Description of Unknown: Exemplary gene or splice site sequence"
aagguacggu

SEQ ID NO: 192 - RNA, 10 nt, Unknown
  source: /note="Description of Unknown: Exemplary gene or splice site sequence"
aagguacguc

SEQ ID NO: 193 - RNA, 10 nt, Unknown
  source: /note="Description of Unknown: Exemplary gene or splice site sequence"
aagguacguu

SEQ ID NO: 194 - RNA, 10 nt, Unknown
  source: /note="Description of Unknown: Exemplary gene or splice site sequence"
aagguacuaa

SEQ ID NO: 195 - RNA, 10 nt, Unknown
  source: /note="Description of Unknown: Exemplary gene or splice site sequence"
aagguacuau

SEQ ID NO: 196 - RNA, 10 nt, Unknown
  source: /note="Description of Unknown: Exemplary gene or splice site sequence"
aagguacucu

SEQ ID NO: 197 - RNA, 10 nt, Unknown
  source: /note="Description of Unknown: Exemplary gene or splice site sequence"
aagguacuga

SEQ ID NO: 198 - RNA, 10 nt, Unknown
  source: /note="Description of Unknown: Exemplary gene or splice site sequence"
aagguacugc

SEQ ID NO: 199 - RNA, 10 nt, Unknown
  source: /note="Description of Unknown: Exemplary gene or splice site sequence"
aagguacugu

SEQ ID NO: 200 - RNA, 10 nt, Unknown
  source: /note="Description of Unknown: Exemplary gene or splice site sequence"
aagguacuuc

SEQ ID NO: 201 - RNA, 10 nt, Unknown
  source: /note="Description of Unknown: Exemplary gene or splice site sequence"
aagguacuug

SEQ ID NO: 202 - RNA, 10 nt, Unknown
  source: /note="Description of Unknown: Exemplary gene or splice site sequence"
aagguacuuu

SEQ ID NO: 203 - RNA, 10 nt, Unknown
  source: /note="Description of Unknown: Exemplary gene or splice site sequence"
aagguagaaa

SEQ ID NO: 204 - RNA, 10 nt, Unknown
  source: /note="Description of Unknown: Exemplary gene or splice site sequence"
aagguagaac

SEQ ID NO: 205 - RNA, 10 nt, Unknown
  source: /note="Description of Unknown: Exemplary gene or splice site sequence"
aagguagaca

SEQ ID NO: 206 - RNA, 10 nt, Unknown
  source: /note="Description of Unknown: Exemplary gene or splice site sequence"
aagguagacc

SEQ ID NO: 207 - RNA, 10 nt, Unknown
  source: /note="Description of Unknown: Exemplary gene or splice site sequence"
aagguagacu

SEQ ID NO: 208 - RNA, 10 nt, Unknown
  source: /note="Description of Unknown: Exemplary gene or splice site sequence"
aagguagagu

SEQ ID NO: 209 - RNA, 10 nt, Unknown
  source: /note="Description of Unknown: Exemplary gene or splice site sequence"
aagguagaua

SEQ ID NO: 210 - RNA, 10 nt, Unknown
  source: /note="Description of Unknown: Exemplary gene or splice site sequence"
aagguagcaa

SEQ ID NO: 211 - RNA, 10 nt, Unknown
  source: /note="Description of Unknown: Exemplary gene or splice site sequence"
aagguagcag

SEQ ID NO: 212 - RNA, 10 nt, Unknown
  source: /note="Description of Unknown: Exemplary gene or splice site sequence"
aagguagcca

SEQ ID NO: 213 - RNA, 10 nt, Unknown
  source: /note="Description of Unknown: Exemplary gene or splice site sequence"
aagguagccu

SEQ ID NO: 214 - RNA, 10 nt, Unknown
  source: /note="Description of Unknown: Exemplary gene or splice site sequence"
aagguagcua

SEQ ID NO: 215 - RNA, 10 nt, Unknown
  source: /note="Description of Unknown: Exemplary gene or splice site sequence"
aagguagcug

SEQ ID NO: 216 - RNA, 10 nt, Unknown
  source: /note="Description of Unknown: Exemplary gene or splice site sequence"
aagguagcuu

SEQ ID NO: 217 - RNA, 10 nt, Unknown
  source: /note="Description of Unknown: Exemplary gene or splice site sequence"
aagguaggaa

SEQ ID NO: 218 - RNA, 10 nt, Unknown
  source: /note="Description of Unknown: Exemplary gene or splice site sequence"
aagguaggag

SEQ ID NO: 219 - RNA, 10 nt, Unknown
  source: /note="Description of Unknown: Exemplary gene or splice site sequence"
aagguaggau

SEQ ID NO: 220 - RNA, 10 nt, Unknown
  source: /note="Description of Unknown: Exemplary gene or splice site sequence"
aagguaggca

SEQ ID NO: 221 - RNA, 10 nt, Unknown
  source: /note="Description of Unknown: Exemplary gene or splice site sequence"
aagguaggcc

SEQ ID NO: 222 - RNA, 10 nt, Unknown
  source: /note="Description of Unknown: Exemplary gene or splice site sequence"
aagguaggcu

SEQ ID NO: 223 - RNA, 10 nt, Unknown
  source: /note="Description of Unknown: Exemplary gene or splice site sequence"
aagguaggga

SEQ ID NO: 224 - RNA, 10 nt, Unknown
  source: /note="Description of Unknown: Exemplary gene or splice site sequence"
aagguagggc

SEQ ID NO: 225 - RNA, 10 nt, Unknown
  source: /note="Description of Unknown: Exemplary gene or splice site sequence"
aagguagggg

SEQ ID NO: 226 - RNA, 10 nt, Unknown
  source: /note="Description of Unknown: Exemplary gene or splice site sequence"
aagguagggu

SEQ ID NO: 227 - RNA, 10 nt, Unknown
  source: /note="Description of Unknown: Exemplary gene or splice site sequence"
aagguaggua

SEQ ID NO: 228 - RNA, 10 nt, Unknown
  source: /note="Description of Unknown: Exemplary gene or splice site sequence"
aagguagguc

SEQ ID NO: 229 - RNA, 10 nt, Unknown
  source: /note="Description of Unknown: Exemplary gene or splice site sequence"
aagguaggug

SEQ ID NO: 230 - RNA, 10 nt, Unknown
  source: /note="Description of Unknown: Exemplary gene or splice site sequence"
aagguagguu

SEQ ID NO: 231 - RNA, 10 nt, Unknown
  source: /note="Description of Unknown: Exemplary gene or splice site sequence"
aagguaguaa

SEQ ID NO: 232 - RNA, 10 nt, Unknown
  source: /note="Description of Unknown: Exemplary gene or splice site sequence"
aagguaguag

SEQ ID NO: 233 - RNA, 10 nt, Unknown
  source: /note="Description of Unknown: Exemplary gene or splice site sequence"
aagguagucu

SEQ ID NO: 234 - RNA, 10 nt, Unknown
  source: /note="Description of Unknown: Exemplary gene or splice site sequence"
aagguagugc

SEQ ID NO: 235 - RNA, 10 nt, Unknown
  source: /note="Description of Unknown: Exemplary gene or splice site sequence"
aagguagugg

SEQ ID NO: 236 - RNA, 10 nt, Unknown
  source: /note="Description of Unknown: Exemplary gene or splice site sequence"
aagguaguuc

SEQ ID NO: 237 - RNA, 10 nt, Unknown
  source: /note="Description of Unknown: Exemplary gene or splice site sequence"
aagguaguuu

SEQ ID NO: 238 - RNA, 10 nt, Unknown
  source: /note="Description of Unknown: Exemplary gene or splice site sequence"
aagguauaaa

SEQ ID NO: 239 - RNA, 10 nt, Unknown
  source: /note="Description of Unknown: Exemplary gene or splice site sequence"
aagguauaau

SEQ ID NO: 240 - RNA, 10 nt, Unknown
  source: /note="Description of Unknown: Exemplary gene or splice site sequence"
aagguauaca

SEQ ID NO: 241 - RNA, 10 nt, Unknown
  source: /note="Description of Unknown: Exemplary gene or splice site sequence"
aagguauacu

SEQ ID NO: 242 - RNA, 10 nt, Unknown
  source: /note="Description of Unknown: Exemplary gene or splice site sequence"
aagguauaua

SEQ ID NO: 243 - RNA, 10 nt, Unknown
  source: /note="Description of Unknown: Exemplary gene or splice site sequence"
aagguauauc

SEQ ID NO: 244 - RNA, 10 nt, Unknown
  source: /note="Description of Unknown: Exemplary gene or splice site sequence"
aagguauaug

SEQ ID NO: 245 - RNA, 10 nt, Unknown
  source: /note="Description of Unknown: Exemplary gene or splice site sequence"
aagguauauu

SEQ ID NO: 246 - RNA, 10 nt, Unknown
  source: /note="Description of Unknown: Exemplary gene or splice site sequence"
aagguaucac

SEQ ID NO: 247 - RNA, 10 nt, Unknown
  source: /note="Description of Unknown: Exemplary gene or splice site sequence"
aagguaucag

SEQ ID NO: 248 - RNA, 10 nt, Unknown
  source: /note="Description of Unknown: Exemplary gene or splice site sequence"
aagguauccc

SEQ ID NO: 249 - RNA, 10 nt, Unknown
  source: /note="Description of Unknown: Exemplary gene or splice site sequence"
aagguauccu

SEQ ID NO: 250 - RNA, 10 nt, Unknown
  source: /note="Description of Unknown: Exemplary gene or splice site sequence"
aagguaucuc

SEQ ID NO: 251 - RNA, 10 nt, Unknown
  source: /note="Description of Unknown: Exemplary gene or splice site sequence"
aagguaucug

SEQ ID NO: 252 - RNA, 10 nt, Unknown
  source: /note="Description of Unknown: Exemplary gene or splice site sequence"
aagguaucuu

SEQ ID NO: 253 - RNA, 10 nt, Unknown
  source: /note="Description of Unknown: Exemplary gene or splice site sequence"
aagguaugaa

SEQ ID NO: 254 - RNA, 10 nt, Unknown
  source: /note="Description of Unknown: Exemplary gene or splice site sequence"
aagguaugac

SEQ ID NO: 255 - RNA, 10 nt, Unknown
  source: /note="Description of Unknown: Exemplary gene or splice site sequence"
aagguaugag

SEQ ID NO: 256 - RNA, 10 nt, Unknown
  source: /note="Description of Unknown: Exemplary gene or splice site sequence"
aagguaugau

SEQ ID NO: 257 - RNA, 10 nt, Unknown
  source: /note="Description of Unknown: Exemplary gene or splice site sequence"
aagguaugca

SEQ ID NO: 258 - RNA, 10 nt, Unknown
  source: /note="Description of Unknown: Exemplary gene or splice site sequence"
aagguaugcc

SEQ ID NO: 259 - RNA, 10 nt, Unknown
  source: /note="Description of Unknown: Exemplary gene or splice site sequence"
aagguaugcu

SEQ ID NO: 260 - RNA, 10 nt, Unknown
  source: /note="Description of Unknown: Exemplary gene or splice site sequence"
aagguaugga

SEQ ID NO: 261 - RNA, 10 nt, Unknown
  source: /note="Description of Unknown: Exemplary gene or splice site sequence"
aagguauggc

SEQ ID NO: 262 - RNA, 10 nt, Unknown
  source: /note="Description of Unknown: Exemplary gene or splice site sequence"
aagguauggg

SEQ ID NO: 263 - RNA, 10 nt, Unknown
  source: /note="Description of Unknown: Exemplary gene or splice site sequence"
aagguaugua

SEQ ID NO: 264 - RNA, 10 nt, Unknown
  source: /note="Description of Unknown: Exemplary gene or splice site sequence"
aagguauguc

SEQ ID NO: 265 - RNA, 10 nt, Unknown
  source: /note="Description of Unknown: Exemplary gene or splice site sequence"
aagguaugug

SEQ ID NO: 266 - RNA, 10 nt, Unknown
  source: /note="Description of Unknown: Exemplary gene or splice site sequence"
aagguauguu

SEQ ID NO: 267 - RNA, 10 nt, Unknown
  source: /note="Description of Unknown: Exemplary gene or splice site sequence"
aagguauuaa

SEQ ID NO: 268 - RNA, 10 nt, Unknown
  source: /note="Description of Unknown: Exemplary gene or splice site sequence"
aagguauuac

SEQ ID NO: 269 - RNA, 10 nt, Unknown
  source: /note="Description of Unknown: Exemplary gene or splice site sequence"
aagguauuag

SEQ ID NO: 270 - RNA, 10 nt, Unknown
  source: /note="Description of Unknown: Exemplary gene or splice site sequence"
aagguauuau

SEQ ID NO: 271 - RNA, 10 nt, Unknown
  source: /note="Description of Unknown: Exemplary gene or splice site sequence"
aagguauucc

SEQ ID NO: 272 - RNA, 10 nt, Unknown
  source: /note="Description of Unknown: Exemplary gene or splice site sequence"
aagguauuga

SEQ ID NO: 273 - RNA, 10 nt, Unknown
  source: /note="Description of Unknown: Exemplary gene or splice site sequence"
aagguauugu

SEQ ID NO: 274 - RNA, 10 nt, Unknown
  source: /note="Description of Unknown: Exemplary gene or splice site sequence"
aagguauuua

SEQ ID NO: 275 - RNA, 10 nt, Unknown
  source: /note="Description of Unknown: Exemplary gene or splice site sequence"
aagguauuuc

SEQ ID NO: 276 - RNA, 10 nt, Unknown
  source: /note="Description of Unknown: Exemplary gene or splice site sequence"
aagguauuug

SEQ ID NO: 277 - RNA, 10 nt, Unknown
  source: /note="Description of Unknown: Exemplary gene or splice site sequence"
aagguauuuu

SEQ ID NO: 278 - RNA, 10 nt, Unknown
  source: /note="Description of Unknown: Exemplary gene or splice site sequence"
aaggucaaau

SEQ ID NO: 279 - RNA, 10 nt, Unknown
  source: /note="Description of Unknown: Exemplary gene or splice site sequence"
aaggucaaga

SEQ ID NO: 280 - RNA, 10 nt, Unknown
  source: /note="Description of Unknown: Exemplary gene or splice site sequence"
aaggucaagu

SEQ ID NO: 281 - RNA, 10 nt, Unknown
  source: /note="Description of Unknown: Exemplary gene or splice site sequence"
aaggucacag

SEQ ID NO: 282 - RNA, 10 nt, Unknown
  source: /note="Description of Unknown: Exemplary gene or splice site sequence"
aaggucagaa

SEQ ID NO: 283 - RNA, 10 nt, Unknown
  source: /note="Description of Unknown: Exemplary gene or splice site sequence"
aaggucagac

SEQ ID NO: 284 - RNA, 10 nt, Unknown
  source: /note="Description of Unknown: Exemplary gene or splice site sequence"
aaggucagag

SEQ ID NO: 285 - RNA, 10 nt, Unknown
  source: /note="Description of Unknown: Exemplary gene or splice site sequence"
aaggucagca

SEQ ID NO: 286 - RNA, 10 nt, Unknown
  source: /note="Description of Unknown: Exemplary gene or splice site sequence"
aaggucagcc

SEQ ID NO: 287 - RNA, 10 nt, Unknown
  source: /note="Description of Unknown: Exemplary gene or splice site sequence"
aaggucagcg

SEQ ID NO: 288 - RNA, 10 nt, Unknown
  source: /note="Description of Unknown: Exemplary gene or splice site sequence"
aaggucagcu

SEQ ID NO: 289 - RNA, 10 nt, Unknown
  source: /note="Description of Unknown: Exemplary gene or splice site sequence"
aaggucagga

SEQ ID NO: 290 - RNA, 10 nt, Unknown
  source: /note="Description of Unknown: Exemplary gene or splice site sequence"
aaggucaggc

SEQ ID NO: 291 - RNA, 10 nt, Unknown
  source: /note="Description of Unknown: Exemplary gene or splice site sequence"
aaggucaggg

SEQ ID NO: 292 - RNA, 10 nt, Unknown
  source: /note="Description of Unknown: Exemplary gene or splice site sequence"
aaggucaggu

SEQ ID NO: 293 - RNA, 10 nt, Unknown
  source: /note="Description of Unknown: Exemplary gene or splice site sequence"
aaggucagua

SEQ ID NO: 294 - RNA, 10 nt, Unknown
  source: /note="Description of Unknown: Exemplary gene or splice site sequence"
aaggucaguc

SEQ ID NO: 295 - RNA, 10 nt, Unknown
  source: /note="Description of Unknown: Exemplary gene or splice site sequence"
aaggucagug

SEQ ID NO: 296 - RNA, 10 nt, Unknown
  source: /note="Description of Unknown: Exemplary gene or splice site sequence"
aaggucaguu

SEQ ID NO: 297 - RNA, 10 nt, Unknown
  source: /note="Description of Unknown: Exemplary gene or splice site sequence"
aaggucauag

SEQ ID NO: 298 - RNA, 10 nt, Unknown
  source: /note="Description of Unknown: Exemplary gene or splice site sequence"
aaggucaucu

SEQ ID NO: 299 - RNA, 10 nt, Unknown
  source: /note="Description of Unknown: Exemplary gene or splice site sequence"
aagguccaca

SEQ ID NO: 300 - RNA, 10 nt, Unknown
  source: /note="Description of Unknown: Exemplary gene or splice site sequence"
aagguccaga

SEQ ID NO: 301 - RNA, 10 nt, Unknown
  source: /note="Description of Unknown: Exemplary gene or splice site sequence"
aagguccaua

SEQ ID NO: 302 - RNA, 10 nt, Unknown
  source: /note="Description of Unknown: Exemplary gene or splice site sequence"
aaggucccag

SEQ ID NO: 303 - RNA, 10 nt, Unknown
  source: /note="Description of Unknown: Exemplary gene or splice site sequence"
aaggucccuc

SEQ ID NO: 304 - RNA, 10 nt, Unknown
  source: /note="Description of Unknown: Exemplary gene or splice site sequence"
aagguccuuc

SEQ ID NO: 305 - RNA, 10 nt, Unknown
  source: /note="Description of Unknown: Exemplary gene or splice site sequence"
aaggucgagg

SEQ ID NO: 306 - RNA, 10 nt, Unknown
  source: /note="Description of Unknown: Exemplary gene or splice site sequence"
aaggucuaau

SEQ ID NO: 307 - RNA, 10 nt, Unknown
  source: /note="Description of Unknown: Exemplary gene or splice site sequence"
aaggucuacc

SEQ ID NO: 308 - RNA, 10 nt, Unknown
  source: /note="Description of Unknown: Exemplary gene or splice site sequence"
aaggucuaua

SEQ ID NO: 309 - RNA, 10 nt, Unknown
  source: /note="Description of Unknown: Exemplary gene or splice site sequence"
aaggucuccu

SEQ ID NO: 310 - RNA, 10 nt, Unknown
  source: /note="Description of Unknown: Exemplary gene or splice site sequence"
aaggucucug

SEQ ID NO: 311 - RNA, 10 nt, Unknown
  source: /note="Description of Unknown: Exemplary gene or splice site sequence"
aaggucucuu

SEQ ID NO: 312 - RNA, 10 nt, Unknown
  source: /note="Description of Unknown: Exemplary gene or splice site sequence"
aaggucugaa

SEQ ID NO: 313 - RNA, 10 nt, Unknown
  source: /note="Description of Unknown: Exemplary gene or splice site sequence"
aaggucugag

SEQ ID NO: 314 - RNA, 10 nt, Unknown
  source: /note="Description of Unknown: Exemplary gene or splice site sequence"
aaggucugga

SEQ ID NO: 315 - RNA, 10 nt, Unknown
  source: /note="Description of Unknown: Exemplary gene or splice site sequence"
aaggucuggg

SEQ ID NO: 316 - RNA, 10 nt, Unknown
  source: /note="Description of Unknown: Exemplary gene or splice site sequence"
aaggucugua

SEQ ID NO: 317 - RNA, 10 nt, Unknown
  source: /note="Description of Unknown: Exemplary gene or splice site sequence"
aaggucuguu

SEQ ID NO: 318 - RNA, 10 nt, Unknown
  source: /note="Description of Unknown: Exemplary gene or splice site sequence"
aaggucuucu

SEQ ID NO: 319 - RNA, 10 nt, Unknown
  source: /note="Description of Unknown: Exemplary gene or splice site sequence"
aaggucuuuu

SEQ ID NO: 320 - RNA, 10 nt, Unknown
  source: /note="Description of Unknown: Exemplary gene or splice site sequence"
aaggugaaac

SEQ ID NO: 321 - RNA, 10 nt, Unknown
  source: /note="Description of Unknown: Exemplary gene or splice site sequence"
aaggugaaag

SEQ ID NO: 322 - RNA, 10 nt, Unknown
  source: /note="Description of Unknown: Exemplary gene or splice site sequence"
aaggugaaau

SEQ ID NO: 323 - RNA, 10 nt, Unknown
  source: /note="Description of Unknown: Exemplary gene or splice site sequence"
aaggugaacu

SEQ ID NO: 324 - RNA, 10 nt, Unknown
  source: /note="Description of Unknown: Exemplary gene or splice site sequence"
aaggugaagc

SEQ ID NO: 325 - RNA, 10 nt, Unknown
  source: /note="Description of Unknown: Exemplary gene or splice site sequence"
aaggugaagg

SEQ ID NO: 326 - RNA, 10 nt, Unknown
  source: /note="Description of Unknown: Exemplary gene or splice site sequence"
aaggugaagu

SEQ ID NO: 327 - RNA, 10 nt, Unknown
  source: /note="Description of Unknown: Exemplary gene or splice site sequence"
aaggugaaua

SEQ ID NO: 328 - RNA, 10 nt, Unknown
  source: /note="Description of Unknown: Exemplary gene or splice site sequence"
aaggugaaug

SEQ ID NO: 329 - RNA, 10 nt, Unknown
  source: /note="Description of Unknown: Exemplary gene or splice site sequence"
aaggugaauu

SEQ ID NO: 330 - RNA, 10 nt, Unknown
  source: /note="Description of Unknown: Exemplary gene or splice site sequence"
aaggugacaa

SEQ ID NO: 331 - RNA, 10 nt, Unknown
  source: /note="Description of Unknown: Exemplary gene or splice site sequence"
aaggugacag

SEQ ID NO: 332 - RNA, 10 nt, Unknown
  source: /note="Description of Unknown: Exemplary gene or splice site sequence"
aaggugacau

SEQ ID NO: 333 - RNA, 10 nt, Unknown
  source: /note="Description of Unknown: Exemplary gene or splice site sequence"
aaggugacug

SEQ ID NO: 334 - RNA, 10 nt, Unknown
  source: /note="Description of Unknown: Exemplary gene or splice site sequence"
aaggugacuu

SEQ ID NO: 335 - RNA, 10 nt, Unknown
  source: /note="Description of Unknown: Exemplary gene or splice site sequence"
aaggugagaa

SEQ ID NO: 336 - RNA, 10 nt, Unknown
  source: /note="Description of Unknown: Exemplary gene or splice site sequence"
aaggugagac

SEQ ID NO: 337 - RNA, 10 nt, Unknown
  source: /note="Description of Unknown: Exemplary gene or splice site sequence"
aaggugagag

SEQ ID NO: 338 - RNA, 10 nt, Unknown
  source: /note="Description of Unknown: Exemplary gene or splice site sequence"
aaggugagau

SEQ ID NO: 339 - RNA, 10 nt, Unknown
  source: /note="Description of Unknown: Exemplary gene or splice site sequence"
aaggugagca

SEQ ID NO: 340 - RNA, 10 nt, Unknown
  source: /note="Description of Unknown: Exemplary gene or splice site sequence"
aaggugagcc

SEQ ID NO: 341 - RNA, 10 nt, Unknown
  source: /note="Description of Unknown: Exemplary gene or splice site sequence"
aaggugagcg

SEQ ID NO: 342 - RNA, 10 nt, Unknown
  source: /note="Description of Unknown: Exemplary gene or splice site sequence"
aaggugagcu

SEQ ID NO: 343 - RNA, 10 nt, Unknown
  source: /note="Description of Unknown: Exemplary gene or splice site sequence"
aaggugagga

SEQ ID NO: 344 - RNA, 10 nt, Unknown
  source: /note="Description of Unknown: Exemplary gene or splice site sequence"
aaggugaggc

SEQ ID NO: 345 - RNA, 10 nt, Unknown
  source: /note="Description of Unknown: Exemplary gene or splice site sequence"
aaggugaggg

SEQ ID NO: 346 - RNA, 10 nt, Unknown
  source: /note="Description of Unknown: Exemplary gene or splice site sequence"
aaggugaggu

SEQ ID NO: 347 - RNA, 10 nt, Unknown
  source: /note="Description of Unknown: Exemplary gene or splice site sequence"
aaggugagua

SEQ ID NO: 348 - RNA, 10 nt, Unknown
  source: /note="Description of Unknown: Exemplary gene or splice site sequence"
aaggugaguc

SEQ ID NO: 349 - RNA, 10 nt, Unknown
  source: /note="Description of Unknown: Exemplary gene or splice site sequence"
aaggugagug

SEQ ID NO: 350 - RNA, 10 nt, Unknown
  source: /note="Description of Unknown: Exemplary gene or splice site sequence"
aaggugaguu

SEQ ID NO: 351 - RNA, 10 nt, Unknown
  source: /note="Description of Unknown: Exemplary gene or splice site sequence"
aaggugauaa

SEQ ID NO: 352 - RNA, 10 nt, Unknown
  source: /note="Description of Unknown: Exemplary gene or splice site sequence"
aaggugauca

SEQ ID NO: 353 - RNA, 10 nt, Unknown
  source: /note="Description of Unknown: Exemplary gene or splice site sequence"
aaggugaucc

SEQ ID NO: 354 - RNA, 10 nt, Unknown
  source: /note="Description of Unknown: Exemplary gene or splice site sequence"
aaggugauga

SEQ ID NO: 355 - RNA, 10 nt, Unknown
  source: /note="Description of Unknown: Exemplary gene or splice site sequence"
aaggugaugc

SEQ ID NO: 356 - RNA, 10 nt, Unknown
  source: /note="Description of Unknown: Exemplary gene or splice site sequence"
aaggugaugu

SEQ ID NO: 357 - RNA, 10 nt, Unknown
  source: /note="Description of Unknown: Exemplary gene or splice site sequence"
aaggugauua

SEQ ID NO: 358 - RNA, 10 nt, Unknown
  source: /note="Description of Unknown: Exemplary gene or splice site sequence"
aaggugauug

SEQ ID NO: 359 - RNA, 10 nt, Unknown
  source: /note="Description of Unknown: Exemplary gene or splice site sequence"
aaggugauuu

SEQ ID NO: 360 - RNA, 10 nt, Unknown
  source: /note="Description of Unknown: Exemplary gene or splice site sequence"
aaggugcaca

SEQ ID NO: 361 - RNA, 10 nt, Unknown
  source: /note="Description of Unknown: Exemplary gene or splice site sequence"
aaggugcauc

SEQ ID NO: 362 - RNA, 10 nt, Unknown
  source: /note="Description of Unknown: Exemplary gene or splice site sequence"
aaggugcccu

SEQ ID NO: 363 - RNA, 10 nt, Unknown
  source: /note="Description of Unknown: Exemplary gene or splice site sequence"
aaggugccug

SEQ ID NO: 364 - RNA, 10 nt, Unknown
  source: /note="Description of Unknown: Exemplary gene or splice site sequence"
aaggugcgug

SEQ ID NO: 365 - RNA, 10 nt, Unknown
  source: /note="Description of Unknown: Exemplary gene or splice site sequence"
aaggugcguu

SEQ ID NO: 366 - RNA, 10 nt, Unknown
  source: /note="Description of Unknown: Exemplary gene or splice site sequence"
aaggugcucc

SEQ ID NO: 367 - RNA, 10 nt, Unknown
  source: /note="Description of Unknown: Exemplary gene or splice site sequence"
aaggugcuga

SEQ ID NO: 368 - RNA, 10 nt, Unknown
  source: /note="Description of Unknown: Exemplary gene or splice site sequence"
aaggugcugc

SEQ ID NO: 369 - RNA, 10 nt, Unknown
  source: /note="Description of Unknown: Exemplary gene or splice site sequence"
aaggugcugg

SEQ ID NO: 370 - RNA, 10 nt, Unknown
  source: /note="Description of Unknown: Exemplary gene or splice site sequence"
aaggugcuua

SEQ ID NO: 371 - RNA, 10 nt, Unknown
  source: /note="Description of Unknown: Exemplary gene or splice site sequence"
aaggugcuuu

SEQ ID NO: 372 - RNA, 10 nt, Unknown
  source: /note="Description of Unknown: Exemplary gene or splice site sequence"
aagguggaua

SEQ ID NO: 373 - RNA, 10 nt, Unknown
  source: /note="Description of Unknown: Exemplary gene or splice site sequence"
aagguggcua

SEQ ID NO: 374 - RNA, 10 nt, Unknown
  source: /note="Description of Unknown: Exemplary gene or splice site sequence"
aagguggcug

SEQ ID NO: 375 - RNA, 10 nt, Unknown
  source: /note="Description of Unknown: Exemplary gene or splice site sequence"
aagguggcuu

SEQ ID NO: 376 - RNA, 10 nt, Unknown
  source: /note="Description of Unknown: Exemplary gene or splice site sequence"
aaggugggaa

SEQ ID NO: 377 - RNA, 10 nt, Unknown
  source: /note="Description of Unknown: Exemplary gene or splice site sequence"
aaggugggag

SEQ ID NO: 378 - RNA, 10 nt, Unknown
  source: /note="Description of Unknown: Exemplary gene or splice site sequence"
aaggugggau

SEQ ID NO: 379 - RNA, 10 nt, Unknown
  source: /note="Description of Unknown: Exemplary gene or splice site sequence"
aaggugggca

SEQ ID NO: 380 - RNA, 10 nt, Unknown
  source: /note="Description of Unknown: Exemplary gene or splice site sequence"
aaggugggcc

SEQ ID NO: 381 - RNA, 10 nt, Unknown
  source: /note="Description of Unknown: Exemplary gene or splice site sequence"
aaggugggcg

SEQ ID NO: 382 - RNA, 10 nt, Unknown
  source: /note="Description of Unknown: Exemplary gene or splice site sequence"
aaggugggga

SEQ ID NO: 383 - RNA, 10 nt, Unknown
  source: /note="Description of Unknown: Exemplary gene or splice site sequence"
aagguggggu

SEQ ID NO: 384 - RNA, 10 nt, Unknown
  source: /note="Description of Unknown: Exemplary gene or splice site sequence"
aaggugggua

SEQ ID NO: 385 - RNA, 10 nt, Unknown
  source: /note="Description of Unknown: Exemplary gene or splice site sequence"
aaggugggug

SEQ ID NO: 386 - RNA, 10 nt, Unknown
  source: /note="Description of Unknown: Exemplary gene or splice site sequence"
aagguggguu

SEQ ID NO: 387 - RNA, 10 nt, Unknown
  source: /note="Description of Unknown: Exemplary gene or splice site sequence"
aaggugguaa

SEQ ID NO: 388 - RNA, 10 nt, Unknown
  source: /note="Description of Unknown: Exemplary gene or splice site sequence"
aaggugguac

SEQ ID NO: 389 - RNA, 10 nt, Unknown
  source: /note="Description of Unknown: Exemplary gene or splice site sequence"
aaggugguau

SEQ ID NO: 390 - RNA, 10 nt, Unknown
  source: /note="Description of Unknown: Exemplary gene or splice site sequence"
aagguggugg

SEQ ID NO: 391 - RNA, 10 nt, Unknown
  source: /note="Description of Unknown: Exemplary gene or splice site sequence"
aaggugguua

SEQ ID NO: 392 - RNA, 10 nt, Unknown
  source: /note="Description of Unknown: Exemplary gene or splice site sequence"
aaggugguuc

SEQ ID NO: 393 - RNA, 10 nt, Unknown
  source: /note="Description of Unknown: Exemplary gene or splice site sequence"
aaggugguuu

SEQ ID NO: 394 - RNA, 10 nt, Unknown
  source: /note="Description of Unknown: Exemplary gene or splice site sequence"
aagguguaag

SEQ ID NO: 395 - RNA, 10 nt, Unknown
  source: /note="Description of Unknown: Exemplary gene or splice site sequence"
aaggugucaa

SEQ ID NO: 396 - RNA, 10 nt, Unknown
  source: /note="Description of Unknown: Exemplary gene or splice site sequence"
aaggugucag

SEQ ID NO: 397 - RNA, 10 nt, Unknown
  source: /note="Description of Unknown: Exemplary gene or splice site sequence"
aaggugucug

SEQ ID NO: 398 - RNA, 10 nt, Unknown
  source: /note="Description of Unknown: Exemplary gene or splice site sequence"
aaggugugaa

SEQ ID NO: 399 - RNA, 10 nt, Unknown
  source: /note="Description of Unknown: Exemplary gene or splice site sequence"
aaggugugag

SEQ ID NO: 400 - RNA, 10 nt, Unknown
  source: /note="Description of Unknown: Exemplary gene or splice site sequence"
aaggugugca

SEQ ID NO: 401 - RNA, 10 nt, Unknown
  source: /note="Description of Unknown: Exemplary gene or splice site sequence"
aaggugugga

SEQ ID NO: 402 - RNA, 10 nt, Unknown
  source: /note="Description of Unknown: Exemplary gene or splice site sequence"
aagguguggu

SEQ ID NO: 403 - RNA, 10 nt, Unknown
  source: /note="Description of Unknown: Exemplary gene or splice site sequence"
aaggugugua

SEQ ID NO: 404 - RNA, 10 nt, Unknown
  source: /note="Description of Unknown: Exemplary gene or splice site sequence"
aagguguguc

SEQ ID NO: 405 - RNA, 10 nt, Unknown
  source: /note="Description of Unknown: Exemplary gene or splice site sequence"
aaggugugug

SEQ ID NO: 406 - RNA, 10 nt, Unknown
  source: /note="Description of Unknown: Exemplary gene or splice site sequence"
aagguguguu

SEQ ID NO: 407 - RNA, 10 nt, Unknown
  source: /note="Description of Unknown: Exemplary gene or splice site sequence"
aagguguucu

SEQ ID NO: 408 - RNA, 10 nt, Unknown
  source: /note="Description of Unknown: Exemplary gene or splice site sequence"
aagguguugc

SEQ ID NO: 409 - RNA, 10 nt, Unknown
  source: /note="Description of Unknown: Exemplary gene or splice site sequence"
aagguguugg

SEQ ID NO: 410 - RNA, 10 nt, Unknown
  source: /note="Description of Unknown: Exemplary gene or splice site sequence"
aagguguuug

SEQ ID NO: 411 - RNA, 10 nt, Unknown
  source: /note="Description of Unknown: Exemplary gene or splice site sequence"
aagguuaaaa

SEQ ID NO: 412 - RNA, 10 nt, Unknown
  source: /note="Description of Unknown: Exemplary gene or splice site sequence"
aagguuaaca

SEQ ID NO: 413 - RNA, 10 nt, Unknown
  source: /note="Description of Unknown: Exemplary gene or splice site sequence"
aagguuaagc

SEQ ID NO: 414 - RNA, 10 nt, Unknown
  source: /note="Description of Unknown: Exemplary gene or splice site sequence"
aagguuaauu

SEQ ID NO: 415 - RNA, 10 nt, Unknown
  source: /note="Description of Unknown: Exemplary gene or splice site sequence"
aagguuacau

SEQ ID NO: 416 - RNA, 10 nt, Unknown
  source: /note="Description of Unknown: Exemplary gene or splice site sequence"
aagguuagaa

SEQ ID NO: 417 - RNA, 10 nt, Unknown
  source: /note="Description of Unknown: Exemplary gene or splice site sequence"
aagguuagau

SEQ ID NO: 418 - RNA, 10 nt, Unknown
  source: /note="Description of Unknown: Exemplary gene or splice site sequence"
aagguuagca

SEQ ID NO: 419 - RNA, 10 nt, Unknown
  source: /note="Description of Unknown: Exemplary gene or splice site sequence"
aagguuagcc

SEQ ID NO: 420 - RNA, 10 nt, Unknown
  source: /note="Description of Unknown: Exemplary gene or splice site sequence"
aagguuagga

SEQ ID NO: 421 - RNA, 10 nt, Unknown
  source: /note="Description of Unknown: Exemplary gene or splice site sequence"
aagguuaggc

SEQ ID NO: 422 - RNA, 10 nt, Unknown
  source: /note="Description of Unknown: Exemplary gene or splice site sequence"
aagguuagua

SEQ ID NO: 423 - RNA, 10 nt, Unknown
  source: /note="Description of Unknown: Exemplary gene or splice site sequence"
aagguuaguc

SEQ ID NO: 424 - RNA, 10 nt, Unknown
  source: /note="Description of Unknown: Exemplary gene or splice site sequence"
aagguuagug

SEQ ID NO: 425 - RNA, 10 nt, Unknown
  source: /note="Description of Unknown: Exemplary gene or splice site sequence"
aagguuaguu

SEQ ID NO: 426 - RNA, 10 nt, Unknown
  source: /note="Description of Unknown: Exemplary gene or splice site sequence"
aagguuauag

SEQ ID NO: 427 - RNA, 10 nt, Unknown
  source: /note="Description of Unknown: Exemplary gene or splice site sequence"
aagguuauga

SEQ ID NO: 428 - RNA, 10 nt, Unknown
  source: /note="Description of Unknown: Exemplary gene or splice site sequence"
aagguucaaa

SEQ ID NO: 429 - RNA, 10 nt, Unknown
  source: /note="Description of Unknown: Exemplary gene or splice site sequence"
aagguucaag

SEQ ID NO: 430 - RNA, 10 nt, Unknown
  source: /note="Description of Unknown: Exemplary gene or splice site sequence"
aagguuccuu

SEQ ID NO: 431 - RNA, 10 nt, Unknown
  source: /note="Description of Unknown: Exemplary gene or splice site sequence"
aagguucggc

SEQ ID NO: 432 - RNA, 10 nt, Unknown
  source: /note="Description of Unknown: Exemplary gene or splice site sequence"
aagguucguu

SEQ ID NO: 433 - RNA, 10 nt, Unknown
  source: /note="Description of Unknown: Exemplary gene or splice site sequence"
aagguucuaa

SEQ ID NO: 434 - RNA, 10 nt, Unknown
  source: /note="Description of Unknown: Exemplary gene or splice site sequence"
aagguucuga

SEQ ID NO: 435 - RNA, 10 nt, Unknown
  source: /note="Description of Unknown: Exemplary gene or splice site sequence"
aagguucuua

SEQ ID NO: 436 - RNA, 10 nt, Unknown
  source: /note="Description of Unknown: Exemplary gene or splice site sequence"
aagguugaau

SEQ ID NO: 437 - RNA, 10 nt, Unknown
  source: /note="Description of Unknown: Exemplary gene or splice site sequence"
aagguugacu

SEQ ID NO: 438 - RNA, 10 nt, Unknown
  source: /note="Description of Unknown: Exemplary gene or splice site sequence"
aagguugagg

SEQ ID NO: 439 - RNA, 10 nt, Unknown
  source: /note="Description of Unknown: Exemplary gene or splice site sequence"
aagguugagu

SEQ ID NO: 440 - RNA, 10 nt, Unknown
  source: /note="Description of Unknown: Exemplary gene or splice site sequence"
aagguugaua

SEQ ID NO: 441 - RNA, 10 nt, Unknown
  source: /note="Description of Unknown: Exemplary gene or splice site sequence"
aagguugcac

SEQ ID NO: 442 - RNA, 10 nt, Unknown
  source: /note="Description of Unknown: Exemplary gene or splice site sequence"
aagguugcug

SEQ ID NO: 443 - RNA, 10 nt, Unknown
  source: /note="Description of Unknown: Exemplary gene or splice site sequence"
aagguuggaa

SEQ ID NO: 444 - RNA, 10 nt, Unknown
  source: /note="Description of Unknown: Exemplary gene or splice site sequence"
aagguuggca

SEQ ID NO: 445 - RNA, 10 nt, Unknown
  source: /note="Description of Unknown: Exemplary gene or splice site sequence"
aagguuggga

SEQ ID NO: 446 - RNA, 10 nt, Unknown
  source: /note="Description of Unknown: Exemplary gene or splice site sequence"
aagguugggg

SEQ ID NO: 447 - RNA, 10 nt, Unknown
  source: /note="Description of Unknown: Exemplary gene or splice site sequence"
aagguuggua

SEQ ID NO: 448 - RNA, 10 nt, Unknown
  source: /note="Description of Unknown: Exemplary gene or splice site sequence"
aagguugguc

SEQ ID NO: 449 - RNA, 10 nt, Unknown
  source: /note="Description of Unknown: Exemplary gene or splice site sequence"
aagguuggug

SEQ ID NO: 450 - RNA, 10 nt, Unknown
  source: /note="Description of Unknown: Exemplary gene or splice site sequence"
aagguugguu

SEQ ID NO: 451 - RNA, 10 nt, Unknown
  source: /note="Description of Unknown: Exemplary gene or splice site sequence"
aagguuguaa

SEQ ID NO: 452 - RNA, 10 nt, Unknown
  source: /note="Description of Unknown: Exemplary gene or splice site sequence"
aagguugucc

SEQ ID NO: 453 - RNA, 10 nt, Unknown
  source: /note="Description of Unknown: Exemplary gene or splice site sequence"
aagguugugc

SEQ ID NO: 454 - RNA, 10 nt, Unknown
  source: /note="Description of Unknown: Exemplary gene or splice site sequence"
aagguuguua

SEQ ID NO: 455 - RNA, 10 nt, Unknown
  source: /note="Description of Unknown: Exemplary gene or splice site sequence"
aagguuuacc

SEQ ID NO: 456 - RNA, 10 nt, Unknown
  source: /note="Description of Unknown: Exemplary gene or splice site sequence"
aagguuuaua

SEQ ID NO: 457 - RNA, 10 nt, Unknown
  source: /note="Description of Unknown: Exemplary gene or splice site sequence"
aagguuuauu

SEQ ID NO: 458 - RNA, 10 nt, Unknown
  source: /note="Description of Unknown: Exemplary gene or splice site sequence"
aagguuuccu

SEQ ID NO: 459 - RNA, 10 nt, Unknown
  source: /note="Description of Unknown: Exemplary gene or splice site sequence"
aagguuucgu

SEQ ID NO: 460 - RNA, 10 nt, Unknown
  source: /note="Description of Unknown: Exemplary gene or splice site sequence"
aagguuugag

SEQ ID NO: 461 - RNA, 10 nt, Unknown
  source: /note="Description of Unknown: Exemplary gene or splice site sequence"
aagguuugca

SEQ ID NO: 462 - RNA, 10 nt, Unknown
  source: /note="Description of Unknown: Exemplary gene or splice site sequence"
aagguuugcc

SEQ ID NO: 463 - RNA, 10 nt, Unknown
  source: /note="Description of Unknown: Exemplary gene or splice site sequence"
aagguuugcu

SEQ ID NO: 464 - RNA, 10 nt, Unknown
  source: /note="Description of Unknown: Exemplary gene or splice site sequence"
aagguuugga

SEQ ID NO: 465 - RNA, 10 nt, Unknown
  source: /note="Description of Unknown: Exemplary gene or splice site sequence"
aagguuuggu

SEQ ID NO: 466 - RNA, 10 nt, Unknown
  source: /note="Description of Unknown: Exemplary gene or splice site sequence"
aagguuugua

SEQ ID NO: 467 - RNA, 10 nt, Unknown
  source: /note="Description of Unknown: Exemplary gene or splice site sequence"
aagguuuguc

SEQ ID NO: 468 - RNA, 10 nt, Unknown
  source: /note="Description of Unknown: Exemplary gene or splice site sequence"
aagguuugug

SEQ ID NO: 469 - RNA, 10 nt, Unknown
  source: /note="Description of Unknown: Exemplary gene or splice site sequence"
aagguuuuaa

SEQ ID NO: 470 - RNA, 10 nt, Unknown
  source: /note="Description of Unknown: Exemplary gene or splice site sequence"
aagguuuuca

SEQ ID NO: 471 - RNA, 10 nt, Unknown
  source: /note="Description of Unknown: Exemplary gene or splice site sequence"
aagguuuucg

SEQ ID NO: 472 - RNA, 10 nt, Unknown
  source: /note="Description of Unknown: Exemplary gene or splice site sequence"
aagguuuugc

SEQ ID NO: 473 - RNA, 10 nt, Unknown
  source: /note="Description of Unknown: Exemplary gene or splice site sequence"
aagguuuugu

SEQ ID NO: 474 - RNA, 10 nt, Unknown
  source: /note="Description of Unknown: Exemplary gene or splice site sequence"
aagguuuuuu

SEQ ID NO: 475 - RNA, 10 nt, Unknown
  source: /note="Description of Unknown: Exemplary gene or splice site sequence"
aaugcaagua

SEQ ID NO: 476 - RNA, 10 nt, Unknown
  source: /note="Description of Unknown: Exemplary gene or splice site sequence"
aaugcaaguc

SEQ ID NO: 477 - RNA, 10 nt, Unknown
  source: /note="Description of Unknown: Exemplary gene or splice site sequence"
aauguaaaca

SEQ ID NO: 478 - RNA, 10 nt, Unknown
  source: /note="Description of Unknown: Exemplary gene or splice site sequence"
aauguaaaua

SEQ ID NO: 479 - RNA, 10 nt, Unknown
  source: /note="Description of Unknown: Exemplary gene or splice site sequence"
aauguaaauc

SEQ ID NO: 480 - RNA, 10 nt, Unknown
  source: /note="Description of Unknown: Exemplary gene or splice site sequence"
aauguaaaug

SEQ ID NO: 481 - RNA, 10 nt, Unknown
  source: /note="Description of Unknown: Exemplary gene or splice site sequence"
aauguaaauu

SEQ ID NO: 482 - RNA, 10 nt, Unknown
  source: /note="Description of Unknown: Exemplary gene or splice site sequence"
aauguaacua

SEQ ID NO: 483 - RNA, 10 nt, Unknown
  source: /note="Description of Unknown: Exemplary gene or splice site sequence"
aauguaagaa

SEQ ID NO: 484 - RNA, 10 nt, Unknown
  source: /note="Description of Unknown: Exemplary gene or splice site sequence"
aauguaagag

SEQ ID NO: 485 - RNA, 10 nt, Unknown
  source: /note="Description of Unknown: Exemplary gene or splice site sequence"
aauguaagau

SEQ ID NO: 486 - RNA, 10 nt, Unknown
  source: /note="Description of Unknown: Exemplary gene or splice site sequence"
aauguaagcc

SEQ ID NO: 487 - RNA, 10 nt, Unknown
  source: /note="Description of Unknown: Exemplary gene or splice site sequence"
aauguaagcu

SEQ ID NO: 488 - RNA, 10 nt, Unknown
  source: /note="Description of Unknown: Exemplary gene or splice site sequence"
aauguaagga

SEQ ID NO: 489 - RNA, 10 nt, Unknown
  source: /note="Description of Unknown: Exemplary gene or splice site sequence"
aauguaagua

SEQ ID NO: 490 - RNA, 10 nt, Unknown
  source: /note="Description of Unknown: Exemplary gene or splice site sequence"
aauguaaguc

SEQ ID NO: 491 - RNA, 10 nt, Unknown
  source: /note="Description of Unknown: Exemplary gene or splice site sequence"
aauguaagug

SEQ ID NO: 492 - RNA, 10 nt, Unknown
  source: /note="Description of Unknown: Exemplary gene or splice site sequence"
aauguaaguu

SEQ ID NO: 493 - RNA, 10 nt, Unknown
  source: /note="Description of Unknown: Exemplary gene or splice site sequence"
aauguaauca

SEQ ID NO: 494 - RNA, 10 nt, Unknown
  source: /note="Description of Unknown: Exemplary gene or splice site sequence"
aauguaauga

SEQ ID NO: 495 - RNA, 10 nt, Unknown
  source: /note="Description of Unknown: Exemplary gene or splice site sequence"
aauguaaugu

SEQ ID NO: 496 - RNA, 10 nt, Unknown
  source: /note="Description of Unknown: Exemplary gene or splice site sequence"
aauguacauc

SEQ ID NO: 497 - RNA, 10 nt, Unknown
  source: /note="Description of Unknown: Exemplary gene or splice site sequence"
aauguacaug

SEQ ID NO: 498 - RNA, 10 nt, Unknown
  source: /note="Description of Unknown: Exemplary gene or splice site sequence"
aauguacgau

SEQ ID NO: 499 - RNA, 10 nt, Unknown
  source: /note="Description of Unknown: Exemplary gene or splice site sequence"
aauguacgua

SEQ ID NO: 500 - RNA, 10 nt, Unknown
  source: /note="Description of Unknown: Exemplary gene or splice site sequence"
aauguacguc

SEQ ID NO: 501 - RNA, 10 nt, Unknown
  source: /note="Description of Unknown: Exemplary gene or splice site sequence"
aauguacgug

SEQ ID NO: 502 - RNA, 10 nt, Unknown
  source: /note="Description of Unknown: Exemplary gene or splice site sequence"
aauguacucu

SEQ ID NO: 503 - RNA, 10 nt, Unknown
  source: /note="Description of Unknown: Exemplary gene or splice site sequence"
aauguaggca

SEQ ID NO: 504 - RNA, 10 nt, Unknown
  source: /note="Description of Unknown: Exemplary gene or splice site sequence"
aauguagguu

SEQ ID NO: 505 - RNA, 10 nt, Unknown
  source: /note="Description of Unknown: Exemplary gene or splice site sequence"
aauguaucua

SEQ ID NO: 506 - RNA, 10 nt, Unknown
  source: /note="Description of Unknown: Exemplary gene or splice site sequence"
aauguaugaa

SEQ ID NO: 507 - RNA, 10 nt, Unknown
  source: /note="Description of Unknown: Exemplary gene or splice site sequence"
aauguaugua

SEQ ID NO: 508 - RNA, 10 nt, Unknown
  source: /note="Description of Unknown: Exemplary gene or splice site sequence"
aauguaugug

SEQ ID NO: 509 - RNA, 10 nt, Unknown
  source: /note="Description of Unknown: Exemplary gene or splice site sequence"
aauguauguu

SEQ ID NO: 510 - RNA, 10 nt, Unknown
  source: /note="Description of Unknown: Exemplary gene or splice site sequence"
aaugucagag

SEQ ID NO: 511 - RNA, 10 nt, Unknown
  source: /note="Description of Unknown: Exemplary gene or splice site sequence"
aaugucagau

SEQ ID NO: 512 - RNA, 10 nt, Unknown
  source: /note="Description of Unknown: Exemplary gene or splice site sequence"
aaugucagcu

SEQ ID NO: 513 - RNA, 10 nt, Unknown
  source: /note="Description of Unknown: Exemplary gene or splice site sequence"
aaugucagua

SEQ ID NO: 514 - RNA, 10 nt, Unknown
  source: /note="Description of Unknown: Exemplary gene or splice site sequence"
aaugucaguc

SEQ ID NO: 515 - RNA, 10 nt, Unknown
  source: /note="Description of Unknown: Exemplary gene or splice site sequence"
aaugucagug

SEQ ID NO: 516 - RNA, 10 nt, Unknown
  source: /note="Description of Unknown: Exemplary gene or splice site sequence"
aaugucaguu

SEQ ID NO: 517 - RNA, 10 nt, Unknown
  source: /note="Description of Unknown: Exemplary gene or splice site sequence"
aaugucggua

SEQ ID NO: 518 - RNA, 10 nt, Unknown
  source: /note="Description of Unknown: Exemplary gene or splice site sequence"
aaugucuguu

SEQ ID NO: 519 - RNA, 10 nt, Unknown
  source: /note="Description of Unknown: Exemplary gene or splice site sequence"
aaugugagaa

SEQ ID NO: 520 - RNA, 10 nt, Unknown
  source: /note="Description of Unknown: Exemplary gene or splice site sequence"
aaugugagca

SEQ ID NO: 521 - RNA, 10 nt, Unknown
  source: /note="Description of Unknown: Exemplary gene or splice site sequence"
aaugugagcc

SEQ ID NO: 522 - RNA, 10 nt, Unknown
  source: /note="Description of Unknown: Exemplary gene or splice site sequence"
aaugugagga

SEQ ID NO: 523 - RNA, 10 nt, Unknown
  source: /note="Description of Unknown: Exemplary gene or splice site sequence"
aaugugagua

SEQ ID NO: 524 - RNA, 10 nt, Unknown
  source: /note="Description of Unknown: Exemplary gene or splice site sequence"
aaugugaguc

SEQ ID NO: 525 - RNA, 10 nt, Unknown
  source: /note="Description of Unknown: Exemplary gene or splice site sequence"
aaugugagug

SEQ ID NO: 526 - RNA, 10 nt, Unknown
  source: /note="Description of Unknown: Exemplary gene or splice site sequence"
aaugugaguu

SEQ ID NO: 527 - RNA, 10 nt, Unknown
  source: /note="Description of Unknown: Exemplary gene or splice site sequence"
aaugugauau

SEQ ID NO: 528 - RNA, 10 nt, Unknown
  source: /note="Description of Unknown: Exemplary gene or splice site sequence"
aaugugcaua

SEQ ID NO: 529 - RNA, 10 nt, Unknown
  source: /note="Description of Unknown: Exemplary gene or splice site sequence"
aaugugcgua

SEQ ID NO: 530 - RNA, 10 nt, Unknown
  source: /note="Description of Unknown: Exemplary gene or splice site sequence"
aaugugcguc

SEQ ID NO: 531 - RNA, 10 nt, Unknown
  source: /note="Description of Unknown: Exemplary gene or splice site sequence"
aaugugggac

SEQ ID NO: 532 - RNA, 10 nt, Unknown
  source: /note="Description of Unknown: Exemplary gene or splice site sequence"
aauguggguc

SEQ ID NO: 533 - RNA, 10 nt, Unknown
  source: /note="Description of Unknown: Exemplary gene or splice site sequence"
aaugugggug

SEQ ID NO: 534 - RNA, 10 nt, Unknown
  source: /note="Description of Unknown: Exemplary gene or splice site sequence"
aaugugguuu

SEQ ID NO: 535 - RNA, 10 nt, Unknown
  source: /note="Description of Unknown: Exemplary gene or splice site sequence"
aaugugugua

SEQ ID NO: 536 - RNA, 10 nt, Unknown
  source: /note="Description of Unknown: Exemplary gene or splice site sequence"
aauguuaagu

SEQ ID NO: 537 - RNA, 10 nt, Unknown
  source: /note="Description of Unknown: Exemplary gene or splice site sequence"
aauguuagaa

SEQ ID NO: 538 - RNA, 10 nt, Unknown
  source: /note="Description of Unknown: Exemplary gene or splice site sequence"
aauguuagau

SEQ ID NO: 539 - RNA, 10 nt, Unknown
  source: /note="Description of Unknown: Exemplary gene or splice site sequence"
aauguuagua

SEQ ID NO: 540 - RNA, 10 nt, Unknown
  source: /note="Description of Unknown: Exemplary gene or splice site sequence"
aauguuggug

SEQ ID NO: 541 - RNA, 10 nt, Unknown
  source: /note="Description of Unknown: Exemplary gene or splice site sequence"
acagcaagua

SEQ ID NO: 542 - RNA, 10 nt, Unknown
  source: /note="Description of Unknown: Exemplary gene or splice site sequence"
acaguaaaua

SEQ ID NO: 543 - RNA, 10 nt, Unknown
  source: /note="Description of Unknown: Exemplary gene or splice site sequence"
acaguaaaug

SEQ ID NO: 544 - RNA, 10 nt, Unknown
  source: /note="Description of Unknown: Exemplary gene or splice site sequence"
acaguaagaa

SEQ ID NO: 545 - RNA, 10 nt, Unknown
  source: /note="Description of Unknown: Exemplary gene or splice site sequence"
acaguaagca

SEQ ID NO: 546 - RNA, 10 nt, Unknown
  source: /note="Description of Unknown: Exemplary gene or splice site sequence"
acaguaagua

SEQ ID NO: 547 - RNA, 10 nt, Unknown
  source: /note="Description of Unknown: Exemplary gene or splice site sequence"
acaguaaguc

SEQ ID NO: 548 - RNA, 10 nt, Unknown
  source: /note="Description of Unknown: Exemplary gene or splice site sequence"
acaguaagug

SEQ ID NO: 549 - RNA, 10 nt, Unknown
  source: /note="Description of Unknown: Exemplary gene or splice site sequence"
acaguaaguu

SEQ ID NO: 550 - RNA, 10 nt, Unknown
  source: /note="Description of Unknown: Exemplary gene or splice site sequence"
acaguacgua

SEQ ID NO: 551 - RNA, 10 nt, Unknown
  source: /note="Description of Unknown: Exemplary gene or splice site sequence"
acaguaggug

SEQ ID NO: 552 - RNA, 10 nt, Unknown
  source: /note="Description of Unknown: Exemplary gene or splice site sequence"
acaguauaac

SEQ ID NO: 553 - RNA, 10 nt, Unknown
  source: /note="Description of Unknown: Exemplary gene or splice site sequence"
acaguaugua

SEQ ID NO: 554 - RNA, 10 nt, Unknown
  source: /note="Description of Unknown: Exemplary gene or splice site sequence"
acagucaguu

SEQ ID NO: 555 - RNA, 10 nt, Unknown
  source: /note="Description of Unknown: Exemplary gene or splice site sequence"
acagugagaa

SEQ ID NO: 556 - RNA, 10 nt, Unknown
  source: /note="Description of Unknown: Exemplary gene or splice site sequence"
acagugagcc

SEQ ID NO: 557 - RNA, 10 nt, Unknown
  source: /note="Description of Unknown: Exemplary gene or splice site sequence"
acagugagcu

SEQ ID NO: 558 - RNA, 10 nt, Unknown
  source: /note="Description of Unknown: Exemplary gene or splice site sequence"
acagugagga

SEQ ID NO: 559 - RNA, 10 nt, Unknown
  source: /note="Description of Unknown: Exemplary gene or splice site sequence"
acagugaggu

SEQ ID NO: 560 - RNA, 10 nt, Unknown
  source: /note="Description of Unknown: Exemplary gene or splice site sequence"
acagugagua

SEQ ID NO: 561 - RNA, 10 nt, Unknown
  source: /note="Description of Unknown: Exemplary gene or splice site sequence"
acagugaguc

SEQ ID NO: 562 - RNA, 10 nt, Unknown
  source: /note="Description of Unknown: Exemplary gene or splice site sequence"
acagugagug

SEQ ID NO: 563 - RNA, 10 nt, Unknown
  source: /note="Description of Unknown: Exemplary gene or splice site sequence"
acagugaguu

SEQ ID NO: 564 - RNA, 10 nt, Unknown
  source: /note="Description of Unknown: Exemplary gene or splice site sequence"
acagugggua

SEQ ID NO: 565 - RNA, 10 nt, Unknown
  source: /note="Description of Unknown: Exemplary gene or splice site sequence"
acaguggguu

SEQ ID NO: 566 - RNA, 10 nt, Unknown
  source: /note="Description of Unknown: Exemplary gene or splice site sequence"
acaguguaaa

SEQ ID NO: 567 - RNA, 10 nt, Unknown
  source: /note="Description of Unknown: Exemplary gene or splice site sequence"
acaguuaagc

SEQ ID NO: 568 - RNA, 10 nt, Unknown
  source: /note="Description of Unknown: Exemplary gene or splice site sequence"
acaguuaagu

SEQ ID NO: 569 - RNA, 10 nt, Unknown
  source: /note="Description of Unknown: Exemplary gene or splice site sequence"
acaguuaugu

SEQ ID NO: 570 - RNA, 10 nt, Unknown
  source: /note="Description of Unknown: Exemplary gene or splice site sequence"
acaguugagu

SEQ ID NO: 571 - RNA, 10 nt, Unknown
  source: /note="Description of Unknown: Exemplary gene or splice site sequence"
acaguuguga

SEQ ID NO: 572 - RNA, 10 nt, Unknown
  source: /note="Description of Unknown: Exemplary gene or splice site sequence"
accguaagua

SEQ ID NO: 573 - RNA, 10 nt, Unknown
  source: /note="Description of Unknown: Exemplary gene or splice site sequence"
accgugagaa

SEQ ID NO: 574 - RNA, 10 nt, Unknown
  source: /note="Description of Unknown: Exemplary gene or splice site sequence"
accgugagca

SEQ ID NO: 575 - RNA, 10 nt, Unknown
  source: /note="Description of Unknown: Exemplary gene or splice site sequence"
accgugaguu

SEQ ID NO: 576 - RNA, 10 nt, Unknown
  source: /note="Description of Unknown: Exemplary gene or splice site sequence"
accgugggug

SEQ ID NO: 577 - RNA, 10 nt, Unknown
  source: /note="Description of Unknown: Exemplary gene or splice site sequence"
acgguaaaac

SEQ ID NO: 578 - RNA, 10 nt, Unknown
  source: /note="Description of Unknown: Exemplary gene or splice site sequence"
acgguaacua

SEQ ID NO: 579 - RNA, 10 nt, Unknown
  source: /note="Description of Unknown: Exemplary gene or splice site sequence"
acgguaagua

SEQ ID NO: 580 - RNA, 10 nt, Unknown
  source: /note="Description of Unknown: Exemplary gene or splice site sequence"
acgguaagug

SEQ ID NO: 581 - RNA, 10 nt, Unknown
  source: /note="Description of Unknown: Exemplary gene or splice site sequence"
acgguaaguu

SEQ ID NO: 582 - RNA, 10 nt, Unknown
  source: /note="Description of Unknown: Exemplary gene or splice site sequence"
acgguaauua

SEQ ID NO: 583 - RNA, 10 nt, Unknown
  source: /note="Description of Unknown: Exemplary gene or splice site sequence"
acgguaauuu

SEQ ID NO: 584 - RNA, 10 nt, Unknown
  source: /note="Description of Unknown: Exemplary gene or splice site sequence"
acgguacaau

SEQ ID NO: 585 - RNA, 10 nt, Unknown
  source: /note="Description of Unknown: Exemplary gene or splice site sequence"
acgguacagu

SEQ ID NO: 586 - RNA, 10 nt, Unknown
  source: /note="Description of Unknown: Exemplary gene or splice site sequence"
acgguaccag

SEQ ID NO: 587 - RNA, 10 nt, Unknown
  source: /note="Description of Unknown: Exemplary gene or splice site sequence"
acgguacggu

SEQ ID NO: 588 - RNA, 10 nt, Unknown
  source: /note="Description of Unknown: Exemplary gene or splice site sequence"
acgguacgua

SEQ ID NO: 589 - RNA, 10 nt, Unknown
  source: /note="Description of Unknown: Exemplary gene or splice site sequence"
acgguaggaa

SEQ ID NO: 590 - RNA, 10 nt, Unknown
  source: /note="Description of Unknown: Exemplary gene or splice site sequence"
acgguaggag

SEQ ID NO: 591 - RNA, 10 nt, Unknown
  source: /note="Description of Unknown: Exemplary gene or splice site sequence"
acgguaggug

SEQ ID NO: 592 - RNA, 10 nt, Unknown
  source: /note="Description of Unknown: Exemplary gene or splice site sequence"
acgguaguaa

SEQ ID NO: 593 - RNA, 10 nt, Unknown
  source: /note="Description of Unknown: Exemplary gene or splice site sequence"
acgguauaau

SEQ ID NO: 594 - RNA, 10 nt, Unknown
  source: /note="Description of Unknown: Exemplary gene or splice site sequence"
acgguaugac

SEQ ID NO: 595 - RNA, 10 nt, Unknown
  source: /note="Description of Unknown: Exemplary gene or splice site sequence"
acgguaugcg

SEQ ID NO: 596 - RNA, 10 nt, Unknown
  source: /note="Description of Unknown: Exemplary gene or splice site sequence"
acgguaugua

SEQ ID NO: 597 - RNA, 10 nt, Unknown
  source: /note="Description of Unknown: Exemplary gene or splice site sequence"
acgguauguc

SEQ ID NO: 598 - RNA, 10 nt, Unknown
  source: /note="Description of Unknown: Exemplary gene or splice site sequence"
acggugaaac

SEQ ID NO: 599 - RNA, 10 nt, Unknown
  source: /note="Description of Unknown: Exemplary gene or splice site sequence"
acggugaagu

SEQ ID NO: 600 - RNA, 10 nt, Unknown
  source: /note="Description of Unknown: Exemplary gene or splice site sequence"
acggugaauc

SEQ ID NO: 601 - RNA, 10 nt, Unknown
  source: /note="Description of Unknown: Exemplary gene or splice site sequence"
acggugacag

SEQ ID NO: 602 - RNA, 10 nt, Unknown
  source: /note="Description of Unknown: Exemplary gene or splice site sequence"
acggugacca

SEQ ID NO: 603 - RNA, 10 nt, Unknown
  source: /note="Description of Unknown: Exemplary gene or splice site sequence"
acggugagaa

SEQ ID NO: 604 - RNA, 10 nt, Unknown
  source: /note="Description of Unknown: Exemplary gene or splice site sequence"
acggugagau

SEQ ID NO: 605 - RNA, 10 nt, Unknown
  source: /note="Description of Unknown: Exemplary gene or splice site sequence"
acggugagcc

SEQ ID NO: 606 - RNA, 10 nt, Unknown
  source: /note="Description of Unknown: Exemplary gene or splice site sequence"
acggugagua

SEQ ID NO: 607 - RNA, 10 nt, Unknown
  source: /note="Description of Unknown: Exemplary gene or splice site sequence"
acggugagug

SEQ ID NO: 608 - RNA, 10 nt, Unknown
  source: /note="Description of Unknown: Exemplary gene or splice site sequence"
acggugaguu

SEQ ID NO: 609 - RNA, 10 nt, Unknown
  source: /note="Description of Unknown: Exemplary gene or splice site sequence"
acggugcgug

SEQ ID NO: 610 - RNA, 10 nt, Unknown
  source: /note="Description of Unknown: Exemplary gene or splice site sequence"
acgguggcac

SEQ ID NO: 611 - RNA, 10 nt, Unknown
  source: /note="Description of Unknown: Exemplary gene or splice site sequence"
acgguggggc

SEQ ID NO: 612 - RNA, 10 nt, Unknown
  source: /note="Description of Unknown: Exemplary gene or splice site sequence"
acggugggug

SEQ ID NO: 613 - RNA, 10 nt, Unknown
  source: /note="Description of Unknown: Exemplary gene or splice site sequence"
acgguguagu

SEQ ID NO: 614 - RNA, 10 nt, Unknown
  source: /note="Description of Unknown: Exemplary gene or splice site sequence"
acggugucac

SEQ ID NO: 615 - RNA, 10 nt, Unknown
  source: /note="Description of Unknown: Exemplary gene or splice site sequence"
acggugugua

SEQ ID NO: 616 - RNA, 10 nt, Unknown
  source: /note="Description of Unknown: Exemplary gene or splice site sequence"
acgguguguu

SEQ ID NO: 617 - RNA, 10 nt, Unknown
  source: /note="Description of Unknown: Exemplary gene or splice site sequence"
acgguuagug

SEQ ID NO: 618 - RNA, 10 nt, Unknown
  source: /note="Description of Unknown: Exemplary gene or splice site sequence"
acgguuaguu

SEQ ID NO: 619 - RNA, 10 nt, Unknown
  source: /note="Description of Unknown: Exemplary gene or splice site sequence"
acgguucaau

SEQ ID NO: 620 - RNA, 10 nt, Unknown
  source: /note="Description of Unknown: Exemplary gene or splice site sequence"
acuguaaaua

SEQ ID NO: 621 - RNA, 10 nt, Unknown
  source: /note="Description of Unknown: Exemplary gene or splice site sequence"
acuguaagaa

SEQ ID NO: 622 - RNA, 10 nt, Unknown
  source: /note="Description of Unknown: Exemplary gene or splice site sequence"
acuguaagac

SEQ ID NO: 623 - RNA, 10 nt, Unknown
  source: /note="Description of Unknown: Exemplary gene or splice site sequence"
acuguaagca

SEQ ID NO: 624 - RNA, 10 nt, Unknown
  source: /note="Description of Unknown: Exemplary gene or splice site sequence"
acuguaagcu

SEQ ID NO: 625 - RNA, 10 nt, Unknown
  source: /note="Description of Unknown: Exemplary gene or splice site sequence"
acuguaagua

SEQ ID NO: 626 - RNA, 10 nt, Unknown
  source: /note="Description of Unknown: Exemplary gene or splice site sequence"
acuguaaguc

SEQ ID NO: 627 - RNA, 10 nt, Unknown
  source: /note="Description of Unknown: Exemplary gene or splice site sequence"
acuguaaguu

SEQ ID NO: 628 - RNA, 10 nt, Unknown
  source: /note="Description of Unknown: Exemplary gene or splice site sequence"
acuguacguu

SEQ ID NO: 629 - RNA, 10 nt, Unknown
  source: /note="Description of Unknown: Exemplary gene or splice site sequence"
acuguacugc

SEQ ID NO: 630 - RNA, 10 nt, Unknown
  source: /note="Description of Unknown: Exemplary gene or splice site sequence"
acuguaggcu

SEQ ID NO: 631 - RNA, 10 nt, Unknown
  source: /note="Description of Unknown: Exemplary gene or splice site sequence"
acuguaggua

SEQ ID NO: 632 - RNA, 10 nt, Unknown
  source: /note="Description of Unknown: Exemplary gene or splice site sequence"
acuguauauu

SEQ ID NO: 633 - RNA, 10 nt, Unknown
  source: /note="Description of Unknown: Exemplary gene or splice site sequence"
acuguaugaa

SEQ ID NO: 634 - RNA, 10 nt, Unknown
  source: /note="Description of Unknown: Exemplary gene or splice site sequence"
acuguaugcu

SEQ ID NO: 635 - RNA, 10 nt, Unknown
  source: /note="Description of Unknown: Exemplary gene or splice site sequence"
acuguaugug

SEQ ID NO: 636 - RNA, 10 nt, Unknown
  source: /note="Description of Unknown: Exemplary gene or splice site sequence"
acuguauucc

SEQ ID NO: 637 - RNA, 10 nt, Unknown
  source: /note="Description of Unknown: Exemplary gene or splice site sequence"
acugucagcu

SEQ ID NO: 638 - RNA, 10 nt, Unknown
  source: /note="Description of Unknown: Exemplary gene or splice site sequence"
acugucagug

SEQ ID NO: 639 - RNA, 10 nt, Unknown
  source: /note="Description of Unknown: Exemplary gene or splice site sequence"
acugugaacg

SEQ ID NO: 640 - RNA, 10 nt, Unknown
  source: /note="Description of Unknown: Exemplary gene or splice site sequence"
acugugagca

SEQ ID NO: 641 - RNA, 10 nt, Unknown
  source: /note="Description of Unknown: Exemplary gene or splice site sequence"
acugugagcg

SEQ ID NO: 642 - RNA, 10 nt, Unknown
  source: /note="Description of Unknown: Exemplary gene or splice site sequence"
acugugagcu

SEQ ID NO: 643 - RNA, 10 nt, Unknown
  source: /note="Description of Unknown: Exemplary gene or splice site sequence"
acugugagua

SEQ ID NO: 644 - RNA, 10 nt, Unknown
  source: /note="Description of Unknown: Exemplary gene or splice site sequence"
acugugaguc

SEQ ID NO: 645 - RNA, 10 nt, Unknown
  source: /note="Description of Unknown: Exemplary gene or splice site sequence"
acugugagug

SEQ ID NO: 646 - RNA, 10 nt, Unknown
  source: /note="Description of Unknown: Exemplary gene or splice site sequence"
acugugaguu

SEQ ID NO: 647 - RNA, 10 nt, Unknown
  source: /note="Description of Unknown: Exemplary gene or splice site sequence"
acugugggua

SEQ ID NO: 648 - RNA, 10 nt, Unknown
  source: /note="Description of Unknown: Exemplary gene or splice site sequence"
acugugugug

SEQ ID NO: 649 - RNA, 10 nt, Unknown
  source: /note="Description of Unknown: Exemplary gene or splice site sequence"
acuguuaagu

SEQ ID NO: 650 - RNA, 10 nt, Unknown
  source: /note="Description of Unknown: Exemplary gene or splice site sequence"
agagcaagua

SEQ ID NO: 651 - RNA, 10 nt, Unknown
  source: /note="Description of Unknown: Exemplary gene or splice site sequence"
agaguaaaac

SEQ ID NO: 652 - RNA, 10 nt, Unknown
  source: /note="Description of Unknown: Exemplary gene or splice site sequence"
agaguaaacg

SEQ ID NO: 653 - RNA, 10 nt, Unknown
  source: /note="Description of Unknown: Exemplary gene or splice site sequence"
agaguaaaga

SEQ ID NO: 654 - RNA, 10 nt, Unknown
  source: /note="Description of Unknown: Exemplary gene or splice site sequence"
agaguaaagu

SEQ ID NO: 655 - RNA, 10 nt, Unknown
  source: /note="Description of Unknown: Exemplary gene or splice site sequence"
agaguaaauc

SEQ ID NO: 656 - RNA, 10 nt, Unknown
  source: /note="Description of Unknown: Exemplary gene or splice site sequence"
agaguaaaug

SEQ ID NO: 657 - RNA, 10 nt, Unknown
  source: /note="Description of Unknown: Exemplary gene or splice site sequence"
agaguaacau

SEQ ID NO: 658 - RNA, 10 nt, Unknown
  source: /note="Description of Unknown: Exemplary gene or splice site sequence"
agaguaacua

SEQ ID NO: 659 - RNA, 10 nt, Unknown
  source: /note="Description of Unknown: Exemplary gene or splice site sequence"
agaguaagaa

SEQ ID NO: 660 - RNA, 10 nt, Unknown
  source: /note="Description of Unknown: Exemplary gene or splice site sequence"
agaguaagac

SEQ ID NO: 661 - RNA, 10 nt, Unknown
  source: /note="Description of Unknown: Exemplary gene or splice site sequence"
agaguaagag

SEQ ID NO: 662 - RNA, 10 nt, Unknown
  source: /note="Description of Unknown: Exemplary gene or splice site sequence"
agaguaagau

SEQ ID NO: 663 - RNA, 10 nt, Unknown
  source: /note="Description of Unknown: Exemplary gene or splice site sequence"
agaguaagca

SEQ ID NO: 664 - RNA, 10 nt, Unknown
  source: /note="Description of Unknown: Exemplary gene or splice site sequence"
agaguaagcu

SEQ ID NO: 665 - RNA, 10 nt, Unknown
  source: /note="Description of Unknown: Exemplary gene or splice site sequence"
agaguaagga

SEQ ID NO: 666 - RNA, 10 nt, Unknown
  source: /note="Description of Unknown: Exemplary gene or splice site sequence"
agaguaaggc

SEQ ID NO: 667 - RNA, 10 nt, Unknown
  source: /note="Description of Unknown: Exemplary gene or splice site sequence"
agaguaaggg

SEQ ID NO: 668 - RNA, 10 nt, Unknown
  source: /note="Description of Unknown: Exemplary gene or splice site sequence"
agaguaaggu

SEQ ID NO: 669 - RNA, 10 nt, Unknown
  source: /note="Description of Unknown: Exemplary gene or splice site sequence"
agaguaaguc

SEQ ID NO: 670 - RNA, 10 nt, Unknown
  source: /note="Description of Unknown: Exemplary gene or splice site sequence"
agaguaagug

SEQ ID NO: 671 - RNA, 10 nt, Unknown
  source: /note="Description of Unknown: Exemplary gene or splice site sequence"
agaguaaguu

SEQ ID NO: 672 - RNA, 10 nt, Unknown
  source: /note="Description of Unknown: Exemplary gene or splice site sequence"
agaguaauaa

SEQ ID NO: 673 - RNA, 10 nt, Unknown
  source: /note="Description of Unknown: Exemplary gene or splice site sequence"
agaguaaugu

SEQ ID NO: 674 - RNA, 10 nt, Unknown
  source: /note="Description of Unknown: Exemplary gene or splice site sequence"
agaguaauuc

SEQ ID NO: 675 - RNA, 10 nt, Unknown
  source: /note="Description of Unknown: Exemplary gene or splice site sequence"
agaguaauuu

SEQ ID NO: 676 - RNA, 10 nt, Unknown
  source: /note="Description of Unknown: Exemplary gene or splice site sequence"
agaguacacc

SEQ ID NO: 677 - RNA, 10 nt, Unknown
  source: /note="Description of Unknown: Exemplary gene or splice site sequence"
agaguaccug

SEQ ID NO: 678 - RNA, 10 nt, Unknown
  source: /note="Description of Unknown: Exemplary gene or splice site sequence"
agaguacgug

SEQ ID NO: 679 - RNA, 10 nt, Unknown
  source: /note="Description of Unknown: Exemplary gene or splice site sequence"
agaguacucu

SEQ ID NO: 680 - RNA, 10 nt, Unknown
  source: /note="Description of Unknown: Exemplary gene or splice site sequence"
agaguacuga

SEQ ID NO: 681 - RNA, 10 nt, Unknown
  source: /note="Description of Unknown: Exemplary gene or splice site sequence"
agaguacuuu

SEQ ID NO: 682 - RNA, 10 nt, Unknown
  source: /note="Description of Unknown: Exemplary gene or splice site sequence"
agaguagcug

SEQ ID NO: 683 - RNA, 10 nt, Unknown
  source: /note="Description of Unknown: Exemplary gene or splice site sequence"
agaguaggaa

SEQ ID NO: 684 - RNA, 10 nt, Unknown
  source: /note="Description of Unknown: Exemplary gene or splice site sequence"
agaguaggga

SEQ ID NO: 685 - RNA, 10 nt, Unknown
  source: /note="Description of Unknown: Exemplary gene or splice site sequence"
agaguagggu

SEQ ID NO: 686 - RNA, 10 nt, Unknown
  source: /note="Description of Unknown: Exemplary gene or splice site sequence"
agaguagguc

SEQ ID NO: 687 - RNA, 10 nt, Unknown
  source: /note="Description of Unknown: Exemplary gene or splice site sequence"
agaguaggug

SEQ ID NO: 688 - RNA, 10 nt, Unknown
  source: /note="Description of Unknown: Exemplary gene or splice site sequence"
agaguagguu

SEQ ID NO: 689 - RNA, 10 nt, Unknown
  source: /note="Description of Unknown: Exemplary gene or splice site sequence"
agaguauaua

SEQ ID NO: 690 - RNA, 10 nt, Unknown
  source: /note="Description of Unknown: Exemplary gene or splice site sequence"
agaguauauu

SEQ ID NO: 691 - RNA, 10 nt, Unknown
  source: /note="Description of Unknown: Exemplary gene or splice site sequence"
agaguaugaa

SEQ ID NO: 692 - RNA, 10 nt, Unknown
  source: /note="Description of Unknown: Exemplary gene or splice site sequence"
agaguaugac

SEQ ID NO: 693 - RNA, 10 nt, Unknown
  source: /note="Description of Unknown: Exemplary gene or splice site sequence"
agaguaugau

SEQ ID NO: 694 - RNA, 10 nt, Unknown
  source: /note="Description of Unknown: Exemplary gene or splice site sequence"
agaguauguc

SEQ ID NO: 695 - RNA, 10 nt, Unknown
  source: /note="Description of Unknown: Exemplary gene or splice site sequence"
agaguaugug

SEQ ID NO: 696 - RNA, 10 nt, Unknown
  source: /note="Description of Unknown: Exemplary gene or splice site sequence"
agaguauguu

SEQ ID NO: 697 - RNA, 10 nt, Unknown
  source: /note="Description of Unknown: Exemplary gene or splice site sequence"
agaguauuaa

SEQ ID NO: 698 - RNA, 10 nt, Unknown
  source: /note="Description of Unknown: Exemplary gene or splice site sequence"
agaguauuau

SEQ ID NO: 699 - RNA, 10 nt, Unknown
  source: /note="Description of Unknown: Exemplary gene or splice site sequence"
agagucagug

SEQ ID NO: 700 - RNA, 10 nt, Unknown
  source: /note="Description of Unknown: Exemplary gene or splice site sequence"
agagugagac

SEQ ID NO: 701 - RNA, 10 nt, Unknown
  source: /note="Description of Unknown: Exemplary gene or splice site sequence"
agagugagag

SEQ ID NO: 702 - RNA, 10 nt, Unknown
  source: /note="Description of Unknown: Exemplary gene or splice site sequence"
agagugagau

SEQ ID NO: 703 - RNA, 10 nt, Unknown
  source: /note="Description of Unknown: Exemplary gene or splice site sequence"
agagugagca

SEQ ID NO: 704 - RNA, 10 nt, Unknown
  source: /note="Description of Unknown: Exemplary gene or splice site sequence"
agagugagua

SEQ ID NO: 705 - RNA, 10 nt, Unknown
  source: /note="Description of Unknown: Exemplary gene or splice site sequence"
agagugaguc

SEQ ID NO: 706 - RNA, 10 nt, Unknown
  source: /note="Description of Unknown: Exemplary gene or splice site sequence"
agagugagug

SEQ ID NO: 707 - RNA, 10 nt, Unknown
  source: /note="Description of Unknown: Exemplary gene or splice site sequence"
agagugaguu

SEQ ID NO: 708 - RNA, 10 nt, Unknown
  source: /note="Description of Unknown: Exemplary gene or splice site sequence"
agagugcguc

SEQ ID NO: 709 - RNA, 10 nt, Unknown
  source: /note="Description of Unknown: Exemplary gene or splice site sequence"
agagugggga

SEQ ID NO: 710 - RNA, 10 nt, Unknown
  source: /note="Description of Unknown: Exemplary gene or splice site sequence"
agagugggug

SEQ ID NO: 711 - RNA, 10 nt, Unknown
  source: /note="Description of Unknown: Exemplary gene or splice site sequence"
agagugugug

SEQ ID NO: 712 - RNA, 10 nt, Unknown
  source: /note="Description of Unknown: Exemplary gene or splice site sequence"
agaguguuuc

SEQ ID NO: 713 - RNA, 10 nt, Unknown
  source: /note="Description of Unknown: Exemplary gene or splice site sequence"
agaguuagua

SEQ ID NO: 714 - RNA, 10 nt, Unknown
  source: /note="Description of Unknown: Exemplary gene or splice site sequence"
agaguugaga

SEQ ID NO: 715 - RNA, 10 nt, Unknown
  source: /note="Description of Unknown: Exemplary gene or splice site sequence"
agaguugagu

SEQ ID NO: 716 - RNA, 10 nt, Unknown
  source: /note="Description of Unknown: Exemplary gene or splice site sequence"
agaguugguu

SEQ ID NO: 717 - RNA, 10 nt, Unknown
  source: /note="Description of Unknown: Exemplary gene or splice site sequence"
agaguuugau

SEQ ID NO: 718 - RNA, 10 nt, Unknown
  source: /note="Description of Unknown: Exemplary gene or splice site sequence"
agcguaagcu

SEQ ID NO: 719 - RNA, 10 nt, Unknown
  source: /note="Description of Unknown: Exemplary gene or splice site sequence"
agcguaagug

SEQ ID NO: 720 - RNA, 10 nt, Unknown
  source: /note="Description of Unknown: Exemplary gene or splice site sequence"
agcgugagcc

SEQ ID NO: 721 - RNA, 10 nt, Unknown
  source: /note="Description of Unknown: Exemplary gene or splice site sequence"
agcgugagug

SEQ ID NO: 722 - RNA, 10 nt, Unknown
  source: /note="Description of Unknown: Exemplary gene or splice site sequence"
agcguuguuc

SEQ ID NO: 723 - RNA, 10 nt, Unknown
  source: /note="Description of Unknown: Exemplary gene or splice site sequence"
agggcagagu

SEQ ID NO: 724 - RNA, 10 nt, Unknown
  source: /note="Description of Unknown: Exemplary gene or splice site sequence"
agggcagccu

SEQ ID NO: 725 - RNA, 10 nt, Unknown
  source: /note="Description of Unknown: Exemplary gene or splice site sequence"
agggcuagua

SEQ ID NO: 726 - RNA, 10 nt, Unknown
  source: /note="Description of Unknown: Exemplary gene or splice site sequence"
aggguaaaga

SEQ ID NO: 727 - RNA, 10 nt, Unknown
  source: /note="Description of Unknown: Exemplary gene or splice site sequence"
aggguaaaua

SEQ ID NO: 728 - RNA, 10 nt, Unknown
  source: /note="Description of Unknown: Exemplary gene or splice site sequence"
aggguaaauc

SEQ ID NO: 729 - RNA, 10 nt, Unknown
  source: /note="Description of Unknown: Exemplary gene or splice site sequence"
aggguaaauu

SEQ ID NO: 730 - RNA, 10 nt, Unknown
  source: /note="Description of Unknown: Exemplary gene or splice site sequence"
aggguaacca

SEQ ID NO: 731 - RNA, 10 nt, Unknown
  source: /note="Description of Unknown: Exemplary gene or splice site sequence"
aggguaacug

SEQ ID NO: 732 - RNA, 10 nt, Unknown
  source: /note="Description of Unknown: Exemplary gene or splice site sequence"
aggguaacuu

SEQ ID NO: 733 - RNA, 10 nt, Unknown
  source: /note="Description of Unknown: Exemplary gene or splice site sequence"
aggguaagaa

SEQ ID NO: 734 - RNA, 10 nt, Unknown
  source: /note="Description of Unknown: Exemplary gene or splice site sequence"
aggguaagag

SEQ ID NO: 735 - RNA, 10 nt, Unknown
  source: /note="Description of Unknown: Exemplary gene or splice site sequence"
aggguaagau

SEQ ID NO: 736 - RNA, 10 nt, Unknown
  source: /note="Description of Unknown: Exemplary gene or splice site sequence"
aggguaagca

SEQ ID NO: 737 - RNA, 10 nt, Unknown
  source: /note="Description of Unknown: Exemplary gene or splice site sequence"
aggguaagga

SEQ ID NO: 738 - RNA, 10 nt, Unknown
  source: /note="Description of Unknown: Exemplary gene or splice site sequence"
aggguaaggc

SEQ ID NO: 739 - RNA, 10 nt, Unknown
  source: /note="Description of Unknown: Exemplary gene or splice site sequence"
aggguaaggg

SEQ ID NO: 740 - RNA, 10 nt, Unknown
  source: /note="Description of Unknown: Exemplary gene or splice site sequence"
aggguaagua

SEQ ID NO: 741 - RNA, 10 nt, Unknown
  source: /note="Description of Unknown: Exemplary gene or splice site sequence"
aggguaaguc

SEQ ID NO: 742 - RNA, 10 nt, Unknown
  source: /note="Description of Unknown: Exemplary gene or splice site sequence"
aggguaagug

SEQ ID NO: 743 - RNA, 10 nt, Unknown
  source: /note="Description of Unknown: Exemplary gene or splice site sequence"
aggguaaguu

SEQ ID NO: 744 - RNA, 10 nt, Unknown
  source: /note="Description of Unknown: Exemplary gene or splice site sequence"
aggguaauac

SEQ ID NO: 745 - RNA, 10 nt, Unknown
  source: /note="Description of Unknown: Exemplary gene or splice site sequence"
aggguaauga

SEQ ID NO: 746 - RNA, 10 nt, Unknown
  source: /note="Description of Unknown: Exemplary gene or splice site sequence"
aggguaauua

SEQ ID NO: 747 - RNA, 10 nt, Unknown
  source: /note="Description of Unknown: Exemplary gene or splice site sequence"
aggguaauuu

SEQ ID NO: 748 - RNA, 10 nt, Unknown
  source: /note="Description of Unknown: Exemplary gene or splice site sequence"
aggguacacc

SEQ ID NO: 749 - RNA, 10 nt, Unknown
  source: /note="Description of Unknown: Exemplary gene or splice site sequence"
aggguacagu

SEQ ID NO: 750 - RNA, 10 nt, Unknown
  source: /note="Description of Unknown: Exemplary gene or splice site sequence"
aggguacggu

SEQ ID NO: 751 - RNA, 10 nt, Unknown
  source: /note="Description of Unknown: Exemplary gene or splice site sequence"
aggguaggac

SEQ ID NO: 752 - RNA, 10 nt, Unknown
  source: /note="Description of Unknown: Exemplary gene or splice site sequence"
aggguaggag

SEQ ID NO: 753 - RNA, 10 nt, Unknown
  source: /note="Description of Unknown: Exemplary gene or splice site sequence"
aggguaggca

SEQ ID NO: 754 - RNA, 10 nt, Unknown
  source: /note="Description of Unknown: Exemplary gene or splice site sequence"
aggguaggcc

SEQ ID NO: 755 - RNA, 10 nt, Unknown
  source: /note="Description of Unknown: Exemplary gene or splice site sequence"
aggguaggga

SEQ ID NO: 756 - RNA, 10 nt, Unknown
  source: /note="Description of Unknown: Exemplary gene or splice site sequence"
aggguagggu

SEQ ID NO: 757 - RNA, 10 nt, Unknown
  source: /note="Description of Unknown: Exemplary gene or splice site sequence"
aggguagguc

SEQ ID NO: 758 - RNA, 10 nt, Unknown
  source: /note="Description of Unknown: Exemplary gene or splice site sequence"
aggguaggug

SEQ ID NO: 759 - RNA, 10 nt, Unknown
  source: /note="Description of Unknown: Exemplary gene or splice site sequence"
aggguagguu

SEQ ID NO: 760 - RNA, 10 nt, Unknown
  source: /note="Description of Unknown: Exemplary gene or splice site sequence"
aggguauaua

SEQ ID NO: 761 - RNA, 10 nt, Unknown
  source: /note="Description of Unknown: Exemplary gene or splice site sequence"
aggguaugac

SEQ ID NO: 762 - RNA, 10 nt, Unknown
  source: /note="Description of Unknown: Exemplary gene or splice site sequence"
aggguaugag

SEQ ID NO: 763 - RNA, 10 nt, Unknown
  source: /note="Description of Unknown: Exemplary gene or splice site sequence"
aggguaugau

SEQ ID NO: 764 - RNA, 10 nt, Unknown
  source: /note="Description of Unknown: Exemplary gene or splice site sequence"
aggguaugca

SEQ ID NO: 765 - RNA, 10 nt, Unknown
  source: /note="Description of Unknown: Exemplary gene or splice site sequence"
aggguaugcu

SEQ ID NO: 766 - RNA, 10 nt, Unknown
  source: /note="Description of Unknown: Exemplary gene or splice site sequence"
aggguauggg

SEQ ID NO: 767 - RNA, 10 nt, Unknown
  source: /note="Description of Unknown: Exemplary gene or splice site sequence"
aggguauggu

SEQ ID NO: 768 - RNA, 10 nt, Unknown
  source: /note="Description of Unknown: Exemplary gene or splice site sequence"
aggguaugua

SEQ ID NO: 769 - RNA, 10 nt, Unknown
  source: /note="Description of Unknown: Exemplary gene or splice site sequence"
aggguauguc

SEQ ID NO: 770 - RNA, 10 nt, Unknown
  source: /note="Description of Unknown: Exemplary gene or splice site sequence"
aggguaugug

SEQ ID NO: 771 - RNA, 10 nt, Unknown
  source: /note="Description of Unknown: Exemplary gene or splice site sequence"
aggguauuac

SEQ ID NO: 772 - RNA, 10 nt, Unknown
  source: /note="Description of Unknown: Exemplary gene or splice site sequence"
aggguauucu

SEQ ID NO: 773 - RNA, 10 nt, Unknown
  source: /note="Description of Unknown: Exemplary gene or splice site sequence"
aggguauuuc

SEQ ID NO: 774 - RNA, 10 nt, Unknown
  source: /note="Description of Unknown: Exemplary gene or splice site sequence"
agggucagag

SEQ ID NO: 775 - RNA, 10 nt, Unknown
  source: /note="Description of Unknown: Exemplary gene or splice site sequence"
agggucagca

SEQ ID NO: 776 - RNA, 10 nt, Unknown
  source: /note="Description of Unknown: Exemplary gene or splice site sequence"
agggucagga

SEQ ID NO: 777 - RNA, 10 nt, Unknown
  source: /note="Description of Unknown: Exemplary gene or splice site sequence"
agggucaggg

SEQ ID NO: 778 - RNA, 10 nt, Unknown
  source: /note="Description of Unknown: Exemplary gene or splice site sequence"
agggucagug

SEQ ID NO: 779 - RNA, 10 nt, Unknown
  source: /note="Description of Unknown: Exemplary gene or splice site sequence"
agggucaguu

SEQ ID NO: 780 - RNA, 10 nt, Unknown
  source: /note="Description of Unknown: Exemplary gene or splice site sequence"
aggguccccu

SEQ ID NO: 781 - RNA, 10 nt, Unknown
  source: /note="Description of Unknown: Exemplary gene or splice site sequence"
agggucggga

SEQ ID NO: 782 - RNA, 10 nt, Unknown
  source: /note="Description of Unknown: Exemplary gene or splice site sequence"
agggucugca

SEQ ID NO: 783 - RNA, 10 nt, Unknown
  source: /note="Description of Unknown: Exemplary gene or splice site sequence"
agggucuguu

SEQ ID NO: 784 - RNA, 10 nt, Unknown
  source: /note="Description of Unknown: Exemplary gene or splice site sequence"
agggugaaga

SEQ ID NO: 785 - RNA, 10 nt, Unknown
  source: /note="Description of Unknown: Exemplary gene or splice site sequence"
agggugacua

SEQ ID NO: 786 - RNA, 10 nt, Unknown
  source: /note="Description of Unknown: Exemplary gene or splice site sequence"
agggugagaa

SEQ ID NO: 787 - RNA, 10 nt, Unknown
  source: /note="Description of Unknown: Exemplary gene or splice site sequence"
agggugagac

SEQ ID NO: 788 - RNA, 10 nt, Unknown
  source: /note="Description of Unknown: Exemplary gene or splice site sequence"
agggugagag

SEQ ID NO: 789 - RNA, 10 nt, Unknown
  source: /note="Description of Unknown: Exemplary gene or splice site sequence"
agggugagca

SEQ ID NO: 790 - RNA, 10 nt, Unknown
  source: /note="Description of Unknown: Exemplary gene or splice site sequence"
agggugagcc

SEQ ID NO: 791 - RNA, 10 nt, Unknown
  source: /note="Description of Unknown: Exemplary gene or splice site sequence"
agggugagcu

SEQ ID NO: 792 - RNA, 10 nt, Unknown
  source: /note="Description of Unknown: Exemplary gene or splice site sequence"
agggugagga

SEQ ID NO: 793 - RNA, 10 nt, Unknown
  source: /note="Description of Unknown: Exemplary gene or splice site sequence"
agggugaggg

SEQ ID NO: 794 - RNA, 10 nt, Unknown
  source: /note="Description of Unknown: Exemplary gene or splice site sequence"
agggugaggu

SEQ ID NO: 795 - RNA, 10 nt, Unknown
  source: /note="Description of Unknown: Exemplary gene or splice site sequence"
agggugagua

SEQ ID NO: 796 - RNA, 10 nt, Unknown
  source: /note="Description of Unknown: Exemplary gene or splice site sequence"
agggugaguc

SEQ ID NO: 797 - RNA, 10 nt, Unknown
  source: /note="Description of Unknown: Exemplary gene or splice site sequence"
agggugagug

SEQ ID NO: 798 - RNA, 10 nt, Unknown
  source: /note="Description of Unknown: Exemplary gene or splice site sequence"
agggugaguu

SEQ ID NO: 799 - RNA, 10 nt, Unknown
  source: /note="Description of Unknown: Exemplary gene or splice site sequence"
agggugggga

SEQ ID NO: 800 - RNA, 10 nt, Unknown
  source: /note="Description of Unknown: Exemplary gene or splice site sequence"
aggguggggu

SEQ ID NO: 801 - RNA, 10 nt, Unknown
  source: /note="Description of Unknown: Exemplary gene or splice site sequence"
agggugggua

SEQ ID NO: 802 - RNA, 10 nt, Unknown
  source: /note="Description of Unknown: Exemplary gene or splice site sequence"
agggugggug

SEQ ID NO: 803 - RNA, 10 nt, Unknown
  source: /note="Description of Unknown: Exemplary gene or splice site sequence"
agggugugua

SEQ ID NO: 804 - RNA, 10 nt, Unknown
  source: /note="Description of Unknown: Exemplary gene or splice site sequence"
agggugugug

SEQ ID NO: 805 - RNA, 10 nt, Unknown
  source: /note="Description of Unknown: Exemplary gene or splice site sequence"
aggguuaaug

SEQ ID NO: 806 - RNA, 10 nt, Unknown
  source: /note="Description of Unknown: Exemplary gene or splice site sequence"
aggguuagaa

SEQ ID NO: 807 - RNA, 10 nt, Unknown
  source: /note="Description of Unknown: Exemplary gene or splice site sequence"
aggguuaguu

SEQ ID NO: 808 - RNA, 10 nt, Unknown
  source: /note="Description of Unknown: Exemplary gene or splice site sequence"
aggguuggug

SEQ ID NO: 809 - RNA, 10 nt, Unknown
  source: /note="Description of Unknown: Exemplary gene or splice site sequence"
aggguuugug

SEQ ID NO: 810 - RNA, 10 nt, Unknown
  source: /note="Description of Unknown: Exemplary gene or splice site sequence"
aggguuuguu

SEQ ID NO: 811 - RNA, 10 nt, Unknown
  source: /note="Description of Unknown: Exemplary gene or splice site sequence"
aguguaaaag

SEQ ID NO: 812 - RNA, 10 nt, Unknown
  source: /note="Description of Unknown: Exemplary gene or splice site sequence"
aguguaaaua

SEQ ID NO: 813 - RNA, 10 nt, Unknown
  source: /note="Description of Unknown: Exemplary gene or splice site sequence"
aguguaaauu

SEQ ID NO: 814 - RNA, 10 nt, Unknown
  source: /note="Description of Unknown: Exemplary gene or splice site sequence"
aguguaagaa

SEQ ID NO: 815 - RNA, 10 nt, Unknown
  source: /note="Description of Unknown: Exemplary gene or splice site sequence"
aguguaagag

SEQ ID NO: 816 - RNA, 10 nt, Unknown
  source: /note="Description of Unknown: Exemplary gene or splice site sequence"
aguguaagau

SEQ ID NO: 817 - RNA, 10 nt, Unknown
  source: /note="Description of Unknown: Exemplary gene or splice site sequence"
aguguaagca

SEQ ID NO: 818 - RNA, 10 nt, Unknown
  source: /note="Description of Unknown: Exemplary gene or splice site sequence"
aguguaagcc

SEQ ID NO: 819 - RNA, 10 nt, Unknown
  source: /note="Description of Unknown: Exemplary gene or splice site sequence"
aguguaagua

SEQ ID NO: 820 - RNA, 10 nt, Unknown
  source: /note="Description of Unknown: Exemplary gene or splice site sequence"
aguguaagug

SEQ ID NO: 821 - RNA, 10 nt, Unknown
  source: /note="Description of Unknown: Exemplary gene or splice site sequence"
aguguaaguu

SEQ ID NO: 822 - RNA, 10 nt, Unknown
  source: /note="Description of Unknown: Exemplary gene or splice site sequence"
aguguaauug

SEQ ID NO: 823 - RNA, 10 nt, Unknown
  source: /note="Description of Unknown: Exemplary gene or splice site sequence"
aguguaggac

SEQ ID NO: 824 - RNA, 10 nt, Unknown
  source: /note="Description of Unknown: Exemplary gene or splice site sequence"
aguguagguc

SEQ ID NO: 825 - RNA, 10 nt, Unknown
  source: /note="Description of Unknown: Exemplary gene or splice site sequence"
aguguaugag

SEQ ID NO: 826 - RNA, 10 nt, Unknown
  source: /note="Description of Unknown: Exemplary gene or splice site sequence"
aguguaugua

SEQ ID NO: 827 - RNA, 10 nt, Unknown
  source: /note="Description of Unknown: Exemplary gene or splice site sequence"
aguguauguu

SEQ ID NO: 828 - RNA, 10 nt, Unknown
  source: /note="Description of Unknown: Exemplary gene or splice site sequence"
aguguauugu

SEQ ID NO: 829 - RNA, 10 nt, Unknown
  source: /note="Description of Unknown: Exemplary gene or splice site sequence"
aguguauuua

SEQ ID NO: 830 - RNA, 10 nt, Unknown
  source: /note="Description of Unknown: Exemplary gene or splice site sequence"
agugucaguc

SEQ ID NO: 831 - RNA, 10 nt, Unknown
  source: /note="Description of Unknown: Exemplary gene or splice site sequence"
agugugagag

SEQ ID NO: 832 - RNA, 10 nt, Unknown
  source: /note="Description of Unknown: Exemplary gene or splice site sequence"
agugugagca

SEQ ID NO: 833 - RNA, 10 nt, Unknown
  source: /note="Description of Unknown: Exemplary gene or splice site sequence"
agugugagcc

SEQ ID NO: 834 - RNA, 10 nt, Unknown
  source: /note="Description of Unknown: Exemplary gene or splice site sequence"
agugugagcu

SEQ ID NO: 835 - RNA, 10 nt, Unknown
  source: /note="Description of Unknown: Exemplary gene or splice site sequence"
agugugagua

SEQ ID NO: 836 - RNA, 10 nt, Unknown
  source: /note="Description of Unknown: Exemplary gene or splice site sequence"
agugugaguc

SEQ ID NO: 837 - RNA, 10 nt, Unknown
  source: /note="Description of Unknown: Exemplary gene or splice site sequence"
agugugagug

SEQ ID NO: 838 - RNA, 10 nt, Unknown
  source: /note="Description of Unknown: Exemplary gene or splice site sequence"
agugugaguu

SEQ ID NO: 839 - RNA, 10 nt, Unknown
  source: /note="Description of Unknown: Exemplary gene or splice site sequence"
agugugggua

SEQ ID NO: 840 - RNA, 10 nt, Unknown
  source: /note="Description of Unknown: Exemplary gene or splice site sequence"
agugugggug

SEQ ID NO: 841 - RNA, 10 nt, Unknown
  source: /note="Description of Unknown: Exemplary gene or splice site sequence"
agugugugua

SEQ ID NO: 842 - RNA, 10 nt, Unknown
  source: /note="Description of Unknown: Exemplary gene or splice site sequence"
aguguuccua

SEQ ID NO: 843 - RNA, 10 nt, Unknown
  source: /note="Description of Unknown: Exemplary gene or splice site sequence"
aguguugggg

SEQ ID NO: 844 - RNA, 10 nt, Unknown
  source: /note="Description of Unknown: Exemplary gene or splice site sequence"
aguguuucag

SEQ ID NO: 845 - RNA, 10 nt, Unknown
  source: /note="Description of Unknown: Exemplary gene or splice site sequence"
auaguaaaua

SEQ ID NO: 846 - RNA, 10 nt, Unknown
  source: /note="Description of Unknown: Exemplary gene or splice site sequence"
auaguaagac

SEQ ID NO: 847 - RNA, 10 nt, Unknown
  source: /note="Description of Unknown: Exemplary gene or splice site sequence"
auaguaagau

SEQ ID NO: 848 - RNA, 10 nt, Unknown
  source: /note="Description of Unknown: Exemplary gene or splice site sequence"
auaguaagca

SEQ ID NO: 849 - RNA, 10 nt, Unknown
  source: /note="Description of Unknown: Exemplary gene or splice site sequence"
auaguaagua

SEQ ID NO: 850 - RNA, 10 nt, Unknown
  source: /note="Description of Unknown: Exemplary gene or splice site sequence"
auaguaagug

SEQ ID NO: 851 - RNA, 10 nt, Unknown
  source: /note="Description of Unknown: Exemplary gene or splice site sequence"
auaguaaguu

SEQ ID NO: 852 - RNA, 10 nt, Unknown
  source: /note="Description of Unknown: Exemplary gene or splice site sequence"
auaguaggua

SEQ ID NO: 853 - RNA, 10 nt, Unknown
  source: /note="Description of Unknown: Exemplary gene or splice site sequence"
auaguauguu

SEQ ID NO: 854 - RNA, 10 nt, Unknown
  source: /note="Description of Unknown: Exemplary gene or splice site sequence"
auagucucac

SEQ ID NO: 855 - RNA, 10 nt, Unknown
  source: /note="Description of Unknown: Exemplary gene or splice site sequence"
auagugagac

SEQ ID NO: 856 - RNA, 10 nt, Unknown
  source: /note="Description of Unknown: Exemplary gene or splice site sequence"
auagugagag

SEQ ID NO: 857 - RNA, 10 nt, Unknown
  source: /note="Description of Unknown: Exemplary gene or splice site sequence"
auagugagau

SEQ ID NO: 858 - RNA, 10 nt, Unknown
  source: /note="Description of Unknown: Exemplary gene or splice site sequence"
auagugagcc

SEQ ID NO: 859 - RNA, 10 nt, Unknown
  source: /note="Description of Unknown: Exemplary gene or splice site sequence"
auagugaggc

SEQ ID NO: 860 - RNA, 10 nt, Unknown
  source: /note="Description of Unknown: Exemplary gene or splice site sequence"
auagugagua

SEQ ID NO: 861 - RNA, 10 nt, Unknown
  source: /note="Description of Unknown: Exemplary gene or splice site sequence"
auagugaguc

SEQ ID NO: 862 - RNA, 10 nt, Unknown
  source: /note="Description of Unknown: Exemplary gene or splice site sequence"
auagugagug

SEQ ID NO: 863 - RNA, 10 nt, Unknown
  source: /note="Description of Unknown: Exemplary gene or splice site sequence"
auagugcguc

SEQ ID NO: 864 - RNA, 10 nt, Unknown
  source: /note="Description of Unknown: Exemplary gene or splice site sequence"
auagugugua

SEQ ID NO: 865 - RNA, 10 nt, Unknown
  source: /note="Description of Unknown: Exemplary gene or splice site sequence"
auaguucagu

SEQ ID NO: 866 - RNA, 10 nt, Unknown
  source: /note="Description of Unknown: Exemplary gene or splice site sequence"
aucguaagcc

SEQ ID NO: 867 - RNA, 10 nt, Unknown
  source: /note="Description of Unknown: Exemplary gene or splice site sequence"
aucguaaguu

SEQ ID NO: 868 - RNA, 10 nt, Unknown
  source: /note="Description of Unknown: Exemplary gene or splice site sequence"
aucguauucc

SEQ ID NO: 869 - RNA, 10 nt, Unknown
  source: /note="Description of Unknown: Exemplary gene or splice site sequence"
aucgugagua

SEQ ID NO: 870 - RNA, 10 nt, Unknown
  source: /note="Description of Unknown: Exemplary gene or splice site sequence"
auggcaagcg

SEQ ID NO: 871 - RNA, 10 nt, Unknown
  source: /note="Description of Unknown: Exemplary gene or splice site sequence"
auggcaagga

SEQ ID NO: 872 - RNA, 10 nt, Unknown
  source: /note="Description of Unknown: Exemplary gene or splice site sequence"
auggcaaguu

SEQ ID NO: 873 - RNA, 10 nt, Unknown
  source: /note="Description of Unknown: Exemplary gene or splice site sequence"
auggcaggua

SEQ ID NO: 874 - RNA, 10 nt, Unknown
  source: /note="Description of Unknown: Exemplary gene or splice site sequence"
auggcaugug

SEQ ID NO: 875 - RNA, 10 nt, Unknown
  source: /note="Description of Unknown: Exemplary gene or splice site sequence"
auggcgccau

SEQ ID NO: 876 - RNA, 10 nt, Unknown
  source: /note="Description of Unknown: Exemplary gene or splice site sequence"
auggcuugug

SEQ ID NO: 877 - RNA, 10 nt, Unknown
  source: /note="Description of Unknown: Exemplary gene or splice site sequence"
augguaaaac

SEQ ID NO: 878 - RNA, 10 nt, Unknown
  source: /note="Description of Unknown: Exemplary gene or splice site sequence"
augguaaaau

SEQ ID NO: 879 - RNA, 10 nt, Unknown
  source: /note="Description of Unknown: Exemplary gene or splice site sequence"
augguaaacc

SEQ ID NO: 880 - RNA, 10 nt, Unknown
  source: /note="Description of Unknown: Exemplary gene or splice site sequence"
augguaaaga

SEQ ID NO: 881 - RNA, 10 nt, Unknown
  source: /note="Description of Unknown: Exemplary gene or splice site sequence"
augguaaaua

SEQ ID NO: 882 - RNA, 10 nt, Unknown
  source: /note="Description of Unknown: Exemplary gene or splice site sequence"
augguaaaug

SEQ ID NO: 883 - RNA, 10 nt, Unknown
  source: /note="Description of Unknown: Exemplary gene or splice site sequence"
augguaaauu

SEQ ID NO: 884 - RNA, 10 nt, Unknown
  source: /note="Description of Unknown: Exemplary gene or splice site sequence"
augguaacag

SEQ ID NO: 885 - RNA, 10 nt, Unknown
  source: /note="Description of Unknown: Exemplary gene or splice site sequence"
augguaacau

SEQ ID NO: 886 - RNA, 10 nt, Unknown
  source: /note="Description of Unknown: Exemplary gene or splice site sequence"
augguaacua

SEQ ID NO: 887 - RNA, 10 nt, Unknown
  source: /note="Description of Unknown: Exemplary gene or splice site sequence"
augguaacuc

SEQ ID NO: 888 - RNA, 10 nt, Unknown
  source: /note="Description of Unknown: Exemplary gene or splice site sequence"
augguaacuu

SEQ ID NO: 889 - RNA, 10 nt, Unknown
  source: /note="Description of Unknown: Exemplary gene or splice site sequence"
augguaagaa

SEQ ID NO: 890 - RNA, 10 nt, Unknown
  source: /note="Description of Unknown: Exemplary gene or splice site sequence"
augguaagac

SEQ ID NO: 891 - RNA, 10 nt, Unknown
  source: /note="Description of Unknown: Exemplary gene or splice site sequence"
augguaagag

SEQ ID NO: 892 - RNA, 10 nt, Unknown
  source: /note="Description of Unknown: Exemplary gene or splice site sequence"
augguaagau

SEQ ID NO: 893 - RNA, 10 nt, Unknown
  source: /note="Description of Unknown: Exemplary gene or splice site sequence"
augguaagca

SEQ ID NO: 894 - RNA, 10 nt, Unknown
  source: /note="Description of Unknown: Exemplary gene or splice site sequence"
augguaagcc

SEQ ID NO: 895 - RNA, 10 nt, Unknown
  source: /note="Description of Unknown: Exemplary gene or splice site sequence"
augguaagcu

SEQ ID NO: 896 - RNA, 10 nt, Unknown
  source: /note="Description of Unknown: Exemplary gene or splice site sequence"
augguaagga

SEQ ID NO: 897 - RNA, 10 nt, Unknown
  source: /note="Description of Unknown: Exemplary gene or splice site sequence"
augguaaggg

SEQ ID NO: 898 - RNA, 10 nt, Unknown
  source: /note="Description of Unknown: Exemplary gene or splice site sequence"
augguaagua

SEQ ID NO: 899 - RNA, 10 nt, Unknown
  source: /note="Description of Unknown: Exemplary gene or splice site sequence"
augguaaguc

SEQ ID NO: 900 - RNA, 10 nt, Unknown
  source: /note="Description of Unknown: Exemplary gene or splice site sequence"
augguaagug

SEQ ID NO: 901 - RNA, 10 nt, Unknown
  source: /note="Description of Unknown: Exemplary gene or splice site sequence"
augguaaguu

SEQ ID NO: 902 - RNA, 10 nt, Unknown
  source: /note="Description of Unknown: Exemplary gene or splice site sequence"
augguaauaa

SEQ ID NO: 903 - RNA, 10 nt, Unknown
  source: /note="Description of Unknown: Exemplary gene or splice site sequence"
augguaauau

SEQ ID NO: 904 - RNA, 10 nt, Unknown
  source: /note="Description of Unknown: Exemplary gene or splice site sequence"
augguaauga

SEQ ID NO: 905 - RNA, 10 nt, Unknown
  source: /note="Description of Unknown: Exemplary gene or splice site sequence"
augguaaugg

SEQ ID NO: 906 - RNA, 10 nt, Unknown
  source: /note="Description of Unknown: Exemplary gene or splice site sequence"
augguaauug

SEQ ID NO: 907 - RNA, 10 nt, Unknown
  source: /note="Description of Unknown: Exemplary gene or splice site sequence"
augguaauuu

SEQ ID NO: 908 - RNA, 10 nt, Unknown
  source: /note="Description of Unknown: Exemplary gene or splice site sequence"
augguacagc

SEQ ID NO: 909 - RNA, 10 nt, Unknown
  source: /note="Description of Unknown: Exemplary gene or splice site sequence"
augguacauc

SEQ ID NO: 910 - RNA, 10 nt, Unknown
  source: /note="Description of Unknown: Exemplary gene or splice site sequence"
augguaccag

SEQ ID NO: 911 - RNA, 10 nt, Unknown
  source: /note="Description of Unknown: Exemplary gene or splice site sequence"
augguaccug

SEQ ID NO: 912 - RNA, 10 nt, Unknown
  source: /note="Description of Unknown: Exemplary gene or splice site sequence"
augguacgag

SEQ ID NO: 913 - RNA, 10 nt, Unknown
  source: /note="Description of Unknown: Exemplary gene or splice site sequence"
augguacggu

SEQ ID NO: 914 - RNA, 10 nt, Unknown
  source: /note="Description of Unknown: Exemplary gene or splice site sequence"
augguagauc

SEQ ID NO: 915 - RNA, 10 nt, Unknown
  source: /note="Description of Unknown: Exemplary gene or splice site sequence"
augguagcag

SEQ ID NO: 916 - RNA, 10 nt, Unknown
  source: /note="Description of Unknown: Exemplary gene or splice site sequence"
augguagcug

SEQ ID NO: 917 - RNA, 10 nt, Unknown
  source: /note="Description of Unknown: Exemplary gene or splice site sequence"
augguaggaa

SEQ ID NO: 918 - RNA, 10 nt, Unknown
  source: /note="Description of Unknown: Exemplary gene or splice site sequence"
augguaggau

SEQ ID NO: 919 - RNA, 10 nt, Unknown
  source: /note="Description of Unknown: Exemplary gene or splice site sequence"
augguaggca

SEQ ID NO: 920 - RNA, 10 nt, Unknown
  source: /note="Description of Unknown: Exemplary gene or splice site sequence"
augguaggcu

SEQ ID NO: 921 - RNA, 10 nt, Unknown
  source: /note="Description of Unknown: Exemplary gene or splice site sequence"
augguagggg

SEQ ID NO: 922 - RNA, 10 nt, Unknown
  source: /note="Description of Unknown: Exemplary gene or splice site sequence"
augguagggu

SEQ ID NO: 923 - RNA, 10 nt, Unknown
  source: /note="Description of Unknown: Exemplary gene or splice site sequence"
augguaggua

SEQ ID NO: 924 - RNA, 10 nt, Unknown
  source: /note="Description of Unknown: Exemplary gene or splice site sequence"
augguaggug

SEQ ID NO: 925 - RNA, 10 nt, Unknown
  source: /note="Description of Unknown: Exemplary gene or splice site sequence"
augguaguuu

SEQ ID NO: 926 - RNA, 10 nt, Unknown
  source: /note="Description of Unknown: Exemplary gene or splice site sequence"
augguauagu

SEQ ID NO: 927 - RNA, 10 nt, Unknown
  source: /note="Description of Unknown: Exemplary gene or splice site sequence"
augguauaua

SEQ ID NO: 928 - RNA, 10 nt, Unknown
  source: /note="Description of Unknown: Exemplary gene or splice site sequence"
augguaucag

SEQ ID NO: 929 - RNA, 10 nt, Unknown
  source: /note="Description of Unknown: Exemplary gene or splice site sequence"
augguaucuu

SEQ ID NO: 930 - RNA, 10 nt, Unknown
  source: /note="Description of Unknown: Exemplary gene or splice site sequence"
augguaugau

SEQ ID NO: 931 - RNA, 10 nt, Unknown
  source: /note="Description of Unknown: Exemplary gene or splice site sequence"
augguaugca

SEQ ID NO: 932 - RNA, 10 nt, Unknown
  source: /note="Description of Unknown: Exemplary gene or splice site sequence"
augguaugcc

SEQ ID NO: 933 - RNA, 10 nt, Unknown
  source: /note="Description of Unknown: Exemplary gene or splice site sequence"
augguaugcg

SEQ ID NO: 934 - RNA, 10 nt, Unknown
  source: /note="Description of Unknown: Exemplary gene or splice site sequence"
augguaugcu

SEQ ID NO: 935 - RNA, 10 nt, Unknown
  source: /note="Description of Unknown: Exemplary gene or splice site sequence"
augguaugga

SEQ ID NO: 936 - RNA, 10 nt, Unknown
  source: /note="Description of Unknown: Exemplary gene or splice site sequence"
augguauggc

SEQ ID NO: 937 - RNA, 10 nt, Unknown
  source: /note="Description of Unknown: Exemplary gene or splice site sequence"
augguaugug

SEQ ID NO: 938 - RNA, 10 nt, Unknown
  source: /note="Description of Unknown: Exemplary gene or splice site sequence"
augguauguu

SEQ ID NO: 939 - RNA, 10 nt, Unknown
  source: /note="Description of Unknown: Exemplary gene or splice site sequence"
augguauuau

SEQ ID NO: 940 - RNA, 10 nt, Unknown
  source: /note="Description of Unknown: Exemplary gene or splice site sequence"
augguauuga

SEQ ID NO: 941 - RNA, 10 nt, Unknown
  source: /note="Description of Unknown: Exemplary gene or splice site sequence"
augguauuug

SEQ ID NO: 942 - RNA, 10 nt, Unknown
  source: /note="Description of Unknown: Exemplary gene or splice site sequence"
auggucaggg

SEQ ID NO: 943 - RNA, 10 nt, Unknown
  source: /note="Description of Unknown: Exemplary gene or splice site sequence"
auggucaguc

SEQ ID NO: 944 - RNA, 10 nt, Unknown
  source: /note="Description of Unknown: Exemplary gene or splice site sequence"
auggucagug

SEQ ID NO: 945 - RNA, 10 nt, Unknown
  source: /note="Description of Unknown: Exemplary gene or splice site sequence"
auggucauuu

SEQ ID NO: 946 - RNA, 10 nt, Unknown
  source: /note="Description of Unknown: Exemplary gene or splice site sequence"
auggugaaaa

SEQ ID NO: 947 - RNA, 10 nt, Unknown
  source: /note="Description of Unknown: Exemplary gene or splice site sequence"
auggugaaac

SEQ ID NO: 948 - RNA, 10 nt, Unknown
  source: /note="Description of Unknown: Exemplary gene or splice site sequence"
auggugaaau

SEQ ID NO: 949 - RNA, 10 nt, Unknown
  source: /note="Description of Unknown: Exemplary gene or splice site sequence"
auggugaacu

SEQ ID NO: 950 - RNA, 10 nt, Unknown
  source: /note="Description of Unknown: Exemplary gene or splice site sequence"
auggugaaga

SEQ ID NO: 951 - RNA, 10 nt, Unknown
  source: /note="Description of Unknown: Exemplary gene or splice site sequence"
auggugacgu

SEQ ID NO: 952 - RNA, 10 nt, Unknown
  source: /note="Description of Unknown: Exemplary gene or splice site sequence"
auggugagaa

SEQ ID NO: 953 - RNA, 10 nt, Unknown
  source: /note="Description of Unknown: Exemplary gene or splice site sequence"
auggugagac

SEQ ID NO: 954 - RNA, 10 nt, Unknown
  source: /note="Description of Unknown: Exemplary gene or splice site sequence"
auggugagag

SEQ ID NO: 955 - RNA, 10 nt, Unknown
  source: /note="Description of Unknown: Exemplary gene or splice site sequence"
auggugagca

SEQ ID NO: 956 - RNA, 10 nt, Unknown
  source: /note="Description of Unknown: Exemplary gene or splice site sequence"
auggugagcc

SEQ ID NO: 957 - RNA, 10 nt, Unknown
  source: /note="Description of Unknown: Exemplary gene or splice site sequence"
auggugagcg

SEQ ID NO: 958 - RNA, 10 nt, Unknown
  source: /note="Description of Unknown: Exemplary gene or splice site sequence"
auggugagcu

SEQ ID NO: 959 - RNA, 10 nt, Unknown
  source: /note="Description of Unknown: Exemplary gene or splice site sequence"
auggugaggc

SEQ ID NO: 960 - RNA, 10 nt, Unknown
  source: /note="Description of Unknown: Exemplary gene or splice site sequence"
auggugaggg

SEQ ID NO: 961 - RNA, 10 nt, Unknown
  source: /note="Description of Unknown: Exemplary gene or splice site sequence"
auggugagua

SEQ ID NO: 962 - RNA, 10 nt, Unknown
  source: /note="Description of Unknown: Exemplary gene or splice site sequence"
auggugaguc

SEQ ID NO: 963 - RNA, 10 nt, Unknown
  source: /note="Description of Unknown: Exemplary gene or splice site sequence"
auggugagug

SEQ ID NO: 964 - RNA, 10 nt, Unknown
  source: /note="Description of Unknown: Exemplary gene or splice site sequence"
auggugaguu

SEQ ID NO: 965 - RNA, 10 nt, Unknown
  source: /note="Description of Unknown: Exemplary gene or splice site sequence"
auggugauuu

SEQ ID NO: 966 - RNA, 10 nt, Unknown
  source: /note="Description of Unknown: Exemplary gene or splice site sequence"
auggugcgau

SEQ ID NO: 967 - RNA, 10 nt, Unknown
  source: /note="Description of Unknown: Exemplary gene or splice site sequence"
auggugcgug

SEQ ID NO: 968 - RNA, 10 nt, Unknown
  source: /note="Description of Unknown: Exemplary gene or splice site sequence"
auggugggua

SEQ ID NO: 969 - RNA, 10 nt, Unknown
  source: /note="Description of Unknown: Exemplary gene or splice site sequence"
auggugggug

SEQ ID NO: 970 - RNA, 10 nt, Unknown
  source: /note="Description of Unknown: Exemplary gene or splice site sequence"
augguggguu

SEQ ID NO: 971 - RNA, 10 nt, Unknown
  source: /note="Description of Unknown: Exemplary gene or splice site sequence"
auggugguua

SEQ ID NO: 972 - RNA, 10 nt, Unknown
  source: /note="Description of Unknown: Exemplary gene or splice site sequence"
augguguaag

SEQ ID NO: 973 - RNA, 10 nt, Unknown
  source: /note="Description of Unknown: Exemplary gene or splice site sequence"
auggugugaa

SEQ ID NO: 974 - RNA, 10 nt, Unknown
  source: /note="Description of Unknown: Exemplary gene or splice site sequence"
auggugugua

SEQ ID NO: 975 - RNA, 10 nt, Unknown
  source: /note="Description of Unknown: Exemplary gene or splice site sequence"
auggugugug

SEQ ID NO: 976 - RNA, 10 nt, Unknown
  source: /note="Description of Unknown: Exemplary gene or splice site sequence"
augguuacuc

SEQ ID NO: 977 - RNA, 10 nt, Unknown
  source: /note="Description of Unknown: Exemplary gene or splice site sequence"
augguuagca

SEQ ID NO: 978 - RNA, 10 nt, Unknown
  source: /note="Description of Unknown: Exemplary gene or splice site sequence"
augguuaguc

SEQ ID NO: 979 - RNA, 10 nt, Unknown
  source: /note="Description of Unknown: Exemplary gene or splice site sequence"
augguuagug

SEQ ID NO: 980 - RNA, 10 nt, Unknown
  source: /note="Description of Unknown: Exemplary gene or splice site sequence"
augguuaguu

SEQ ID NO: 981 - RNA, 10 nt, Unknown
  source: /note="Description of Unknown: Exemplary gene or splice site sequence"
augguucagu

SEQ ID NO: 982 - RNA, 10 nt, Unknown
  source: /note="Description of Unknown: Exemplary gene or splice site sequence"
augguucguc

SEQ ID NO: 983 - RNA, 10 nt, Unknown
  source: /note="Description of Unknown: Exemplary gene or splice site sequence"
augguuggua

SEQ ID NO: 984 - RNA, 10 nt, Unknown
  source: /note="Description of Unknown: Exemplary gene or splice site sequence"
augguugguc

SEQ ID NO: 985 - RNA, 10 nt, Unknown
  source: /note="Description of Unknown: Exemplary gene or splice site sequence"
augguugguu

SEQ ID NO: 986 - RNA, 10 nt, Unknown
  source: /note="Description of Unknown: Exemplary gene or splice site sequence"
augguuguuu

SEQ ID NO: 987 - RNA, 10 nt, Unknown
  source: /note="Description of Unknown: Exemplary gene or splice site sequence"
augguuugca

SEQ ID NO: 988 - RNA, 10 nt, Unknown
  source: /note="Description of Unknown: Exemplary gene or splice site sequence"
augguuugua

SEQ ID NO: 989 - RNA, 10 nt, Unknown
  source: /note="Description of Unknown: Exemplary gene or splice site sequence"
auugcaagua

SEQ ID NO: 990 - RNA, 10 nt, Unknown
  source: /note="Description of Unknown: Exemplary gene or splice site sequence"
auuguaaaua

SEQ ID NO: 991 - RNA, 10 nt, Unknown
  source: /note="Description of Unknown: Exemplary gene or splice site sequence"
auuguaagau

SEQ ID NO: 992 - RNA, 10 nt, Unknown
  source: /note="Description of Unknown: Exemplary gene or splice site sequence"
auuguaagca

SEQ ID NO: 993 - RNA, 10 nt, Unknown
  source: /note="Description of Unknown: Exemplary gene or splice site sequence"
auuguaagga

SEQ ID NO: 994 - RNA, 10 nt, Unknown
  source: /note="Description of Unknown: Exemplary gene or splice site sequence"
auuguaaggc

SEQ ID NO: 995 - RNA, 10 nt, Unknown
  source: /note="Description of Unknown: Exemplary gene or splice site sequence"
auuguaagua

SEQ ID NO: 996 - RNA, 10 nt, Unknown
  source: /note="Description of Unknown: Exemplary gene or splice site sequence"
auuguaaguc

SEQ ID NO: 997 - RNA, 10 nt, Unknown
  source: /note="Description of Unknown: Exemplary gene or splice site sequence"
auuguaaguu

SEQ ID NO: 998 - RNA, 10 nt, Unknown
  source: /note="Description of Unknown: Exemplary gene or splice site sequence"
auuguaauua

SEQ ID NO: 999 - RNA, 10 nt, Unknown
  source: /note="Description of Unknown: Exemplary gene or splice site sequence"
auuguaauuu

SEQ ID NO: 1000 - RNA, 10 nt, Unknown
  source: /note="Description of Unknown: Exemplary gene or splice site sequence"
auuguacaaa

SEQ ID NO: 1001 - RNA, 10 nt, Unknown
  source: /note="Description of Unknown: Exemplary gene or splice site sequence"
auuguaccuc

SEQ ID NO: 1002 - RNA, 10 nt, Unknown
  source: /note="Description of Unknown: Exemplary gene or splice site sequence"
auuguacgug

SEQ ID NO: 1003 - RNA, 10 nt, Unknown
  source: /note="Description of Unknown: Exemplary gene or splice site sequence"
auuguacuug

SEQ ID NO: 1004 - RNA, 10 nt, Unknown
  source: /note="Description of Unknown: Exemplary gene or splice site sequence"
auuguaggua

SEQ ID NO: 1005 - RNA, 10 nt, Unknown
  source: /note="Description of Unknown: Exemplary gene or splice site sequence"
auuguaugag

SEQ ID NO: 1006 - RNA, 10 nt, Unknown
  source: /note="Description of Unknown: Exemplary gene or splice site sequence"
auuguaugua

SEQ ID NO: 1007 - RNA, 10 nt, Unknown
  source: /note="Description of Unknown: Exemplary gene or splice site sequence"
auugucuguu

SEQ ID NO: 1008 - RNA, 10 nt, Unknown
  source: /note="Description of Unknown: Exemplary gene or splice site sequence"
auugugagcu

SEQ ID NO: 1009 - RNA, 10 nt, Unknown
  source: /note="Description of Unknown: Exemplary gene or splice site sequence"
auugugagua

SEQ ID NO: 1010 - RNA, 10 nt, Unknown
  source: /note="Description of Unknown: Exemplary gene or splice site sequence"
auugugaguc

SEQ ID NO: 1011 - RNA, 10 nt, Unknown
  source: /note="Description of Unknown: Exemplary gene or splice site sequence"
auugugaguu

SEQ ID NO: 1012 - RNA, 10 nt, Unknown
  source: /note="Description of Unknown: Exemplary gene or splice site sequence"
auugugcgug

SEQ ID NO: 1013 - RNA, 10 nt, Unknown
  source: /note="Description of Unknown: Exemplary gene or splice site sequence"
auugugggug

SEQ ID NO: 1014 - RNA, 10 nt, Unknown
  source: /note="Description of Unknown: Exemplary gene or splice site sequence"
auuguuagug

SEQ ID NO: 1015 - RNA, 10 nt, Unknown
  source: /note="Description of Unknown: Exemplary gene or splice site sequence"
caaguaaaaa

SEQ ID NO: 1016 - RNA, 10 nt, Unknown
  source: /note="Description of Unknown: Exemplary gene or splice site sequence"
caaguaaaua

SEQ ID NO: 1017 - RNA, 10 nt, Unknown
  source: /note="Description of Unknown: Exemplary gene or splice site sequence"
caaguaaauc

SEQ ID NO: 1018 - RNA, 10 nt, Unknown
  source: /note="Description of Unknown: Exemplary gene or splice site sequence"
caaguaaaug

SEQ ID NO: 1019 - RNA, 10 nt, Unknown
  source: /note="Description of Unknown: Exemplary gene or splice site sequence"
caaguaaccc

SEQ ID NO: 1020 - RNA, 10 nt, Unknown
  source: /note="Description of Unknown: Exemplary gene or splice site sequence"
caaguaacua

SEQ ID NO: 1021 - RNA, 10 nt, Unknown
  source: /note="Description of Unknown: Exemplary gene or splice site sequence"
caaguaacug

SEQ ID NO: 1022 - RNA, 10 nt, Unknown
  source: /note="Description of Unknown: Exemplary gene or splice site sequence"
caaguaagaa

SEQ ID NO: 1023 - RNA, 10 nt, Unknown
  source: /note="Description of Unknown: Exemplary gene or splice site sequence"
caaguaagac

SEQ ID NO: 1024 - RNA, 10 nt, Unknown
  source: /note="Description of Unknown: Exemplary gene or splice site sequence"
caaguaagau

SEQ ID NO: 1025 - RNA, 10 nt, Unknown
  source: /note="Description of Unknown: Exemplary gene or splice site sequence"
caaguaaggu

SEQ ID NO: 1026 - RNA, 10 nt, Unknown
  source: /note="Description of Unknown: Exemplary gene or splice site sequence"
caaguaagua

SEQ ID NO: 1027 - RNA, 10 nt, Unknown
  source: /note="Description of Unknown: Exemplary gene or splice site sequence"
caaguaaguc

SEQ ID NO: 1028 - RNA, 10 nt, Unknown
  source: /note="Description of Unknown: Exemplary gene or splice site sequence"
caaguaagug

SEQ ID NO: 1029 - RNA, 10 nt, Unknown
  source: /note="Description of Unknown: Exemplary gene or splice site sequence"
caaguaaguu

SEQ ID NO: 1030 - RNA, 10 nt, Unknown
  source: /note="Description of Unknown: Exemplary gene or splice site sequence"
caaguaaucc

SEQ ID NO: 1031 - RNA, 10 nt, Unknown
  source: /note="Description of Unknown: Exemplary gene or splice site sequence"
caaguaaucu

SEQ ID NO: 1032 - RNA, 10 nt, Unknown
  source: /note="Description of Unknown: Exemplary gene or splice site sequence"
caaguaauua

SEQ ID NO: 1033 - RNA, 10 nt, Unknown
  source: /note="Description of Unknown: Exemplary gene or splice site sequence"
caaguaauuc

SEQ ID NO: 1034 - RNA, 10 nt, Unknown
  source: /note="Description of Unknown: Exemplary gene or splice site sequence"
caaguaauug

SEQ ID NO: 1035 - RNA, 10 nt, Unknown
  source: /note="Description of Unknown: Exemplary gene or splice site sequence"
caaguaauuu

SEQ ID NO: 1036 - RNA, 10 nt, Unknown
  source: /note="Description of Unknown: Exemplary gene or splice site sequence"
caaguacaca

SEQ ID NO: 1037 - RNA, 10 nt, Unknown
  source: /note="Description of Unknown: Exemplary gene or splice site sequence"
caaguacguu

SEQ ID NO: 1038 - RNA, 10 nt, Unknown
  source: /note="Description of Unknown: Exemplary gene or splice site sequence"
caaguacuuu

SEQ ID NO: 1039 - RNA, 10 nt, Unknown
  source: /note="Description of Unknown: Exemplary gene or splice site sequence"
caaguagcug

SEQ ID NO: 1040 - RNA, 10 nt, Unknown
  source: /note="Description of Unknown: Exemplary gene or splice site sequence"
caaguaggau

SEQ ID NO: 1041 - RNA, 10 nt, Unknown
  source: /note="Description of Unknown: Exemplary gene or splice site sequence"
caaguaggua

SEQ ID NO: 1042 - RNA, 10 nt, Unknown
  source: /note="Description of Unknown: Exemplary gene or splice site sequence"
caaguagguc

SEQ ID NO: 1043 - RNA, 10 nt, Unknown
  source: /note="Description of Unknown: Exemplary gene or splice site sequence"
caaguaggug

SEQ ID NO: 1044 - RNA, 10 nt, Unknown
  source: /note="Description of Unknown: Exemplary gene or splice site sequence"
caaguagguu

SEQ ID NO: 1045 - RNA, 10 nt, Unknown
  source: /note="Description of Unknown: Exemplary gene or splice site sequence"
caaguaguuu

SEQ ID NO: 1046 - RNA, 10 nt, Unknown
  source: /note="Description of Unknown: Exemplary gene or splice site sequence"
caaguauaac

SEQ ID NO: 1047 - RNA, 10 nt, Unknown
  source: /note="Description of Unknown: Exemplary gene or splice site sequence"
caaguauaug

SEQ ID NO: 1048 - RNA, 10 nt, Unknown
  source: /note="Description of Unknown: Exemplary gene or splice site sequence"
caaguaucuu

SEQ ID NO: 1049 - RNA, 10 nt, Unknown
  source: /note="Description of Unknown: Exemplary gene or splice site sequence"
caaguaugag

SEQ ID NO: 1050 - RNA, 10 nt, Unknown
  source: /note="Description of Unknown: Exemplary gene or splice site sequence"
caaguaugua

SEQ ID NO: 1051 - RNA, 10 nt, Unknown
  source: /note="Description of Unknown: Exemplary gene or splice site sequence"
caaguauguc

SEQ ID NO: 1052 - RNA, 10 nt, Unknown
  source: /note="Description of Unknown: Exemplary gene or splice site sequence"
caaguaugug

SEQ ID NO: 1053 - RNA, 10 nt, Unknown
  source: /note="Description of Unknown: Exemplary gene or splice site sequence"
caaguauguu

SEQ ID NO: 1054 - RNA, 10 nt, Unknown
  source: /note="Description of Unknown: Exemplary gene or splice site sequence"
caaguauuga

SEQ ID NO: 1055 - RNA, 10 nt, Unknown
  source: /note="Description of Unknown: Exemplary gene or splice site sequence"
caaguauuuc

SEQ ID NO: 1056 - RNA, 10 nt, Unknown
  source: /note="Description of Unknown: Exemplary gene or splice site sequence"
caagucagac

SEQ ID NO: 1057 - RNA, 10 nt, Unknown
  source: /note="Description of Unknown: Exemplary gene or splice site sequence"
caagucagua

SEQ ID NO: 1058 - RNA, 10 nt, Unknown
  source: /note="Description of Unknown: Exemplary gene or splice site sequence"
caagucuaua

SEQ ID NO: 1059 - RNA, 10 nt, Unknown
  source: /note="Description of Unknown: Exemplary gene or splice site sequence"
caagucugau

SEQ ID NO: 1060 - RNA, 10 nt, Unknown
  source: /note="Description of Unknown: Exemplary gene or splice site sequence"
caagugacuu

SEQ ID NO: 1061 - RNA, 10 nt, Unknown
  source: /note="Description of Unknown: Exemplary gene or splice site sequence"
caagugagaa

SEQ ID NO: 1062 - RNA, 10 nt, Unknown
  source: /note="Description of Unknown: Exemplary gene or splice site sequence"
caagugagac

SEQ ID NO: 1063 - RNA, 10 nt, Unknown
  source: /note="Description of Unknown: Exemplary gene or splice site sequence"
caagugagca

SEQ ID NO: 1064 - RNA, 10 nt, Unknown
  source: /note="Description of Unknown: Exemplary gene or splice site sequence"
caagugaggc

SEQ ID NO: 1065 - RNA, 10 nt, Unknown
  source: /note="Description of Unknown: Exemplary gene or splice site sequence"
caagugaggg

SEQ ID NO: 1066 - RNA, 10 nt, Unknown
  source: /note="Description of Unknown: Exemplary gene or splice site sequence"
caagugagua

SEQ ID NO: 1067 - RNA, 10 nt, Unknown
  source: /note="Description of Unknown: Exemplary gene or splice site sequence"
caagugaguc

SEQ ID NO: 1068 - RNA, 10 nt, Unknown
  source: /note="Description of Unknown: Exemplary gene or splice site sequence"
caagugagug

SEQ ID NO: 1069 - RNA, 10 nt, Unknown
  source: /note="Description of Unknown: Exemplary gene or splice site sequence"
caagugaucc

SEQ ID NO: 1070 - RNA, 10 nt, Unknown
  source: /note="Description of Unknown: Exemplary gene or splice site sequence"
caagugaucu

SEQ ID NO: 1071 - RNA, 10 nt, Unknown
  source: /note="Description of Unknown: Exemplary gene or splice site sequence"
caagugauuc

SEQ ID NO: 1072 - RNA, 10 nt, Unknown
  source: /note="Description of Unknown: Exemplary gene or splice site sequence"
caagugauug

SEQ ID NO: 1073 - RNA, 10 nt, Unknown
  source: /note="Description of Unknown: Exemplary gene or splice site sequence"
caagugauuu

SEQ ID NO: 1074 - RNA, 10 nt, Unknown
  source: /note="Description of Unknown: Exemplary gene or splice site sequence"
caagugccuu

SEQ ID NO: 1075 - RNA, 10 nt, Unknown
  source: /note="Description of Unknown: Exemplary gene or splice site sequence"
caagugggua

SEQ ID NO: 1076 - RNA, 10 nt, Unknown
  source: /note="Description of Unknown: Exemplary gene or splice site sequence"
caaguggguc

SEQ ID NO: 1077 - RNA, 10 nt, Unknown
  source: /note="Description of Unknown: Exemplary gene or splice site sequence"
caagugggug

SEQ ID NO: 1078 - RNA, 10 nt, Unknown
  source: /note="Description of Unknown: Exemplary gene or splice site sequence"
caagugugag

SEQ ID NO: 1079 - RNA, 10 nt, Unknown
  source: /note="Description of Unknown: Exemplary gene or splice site sequence"
caaguuaaaa

SEQ ID NO: 1080 - RNA, 10 nt, Unknown
  source: /note="Description of Unknown: Exemplary gene or splice site sequence"
caaguuaagu

SEQ ID NO: 1081 - RNA, 10 nt, Unknown
  source: /note="Description of Unknown: Exemplary gene or splice site sequence"
caaguuaauc

SEQ ID NO: 1082 - RNA, 10 nt, Unknown
  source: /note="Description of Unknown: Exemplary gene or splice site sequence"
caaguuagaa

SEQ ID NO: 1083 - RNA, 10 nt, Unknown
  source: /note="Description of Unknown: Exemplary gene or splice site sequence"
caaguuaguu

SEQ ID NO: 1084 - RNA, 10 nt, Unknown
  source: /note="Description of Unknown: Exemplary gene or splice site sequence"
caaguucaag

SEQ ID NO: 1085 - RNA, 10 nt, Unknown
  source: /note="Description of Unknown: Exemplary gene or splice site sequence"
caaguuccgu

SEQ ID NO: 1086 - RNA, 10 nt, Unknown
  source: /note="Description of Unknown: Exemplary gene or splice site sequence"
caaguuggua

SEQ ID NO: 1087 - RNA, 10 nt, Unknown
  source: /note="Description of Unknown: Exemplary gene or splice site sequence"
caaguuuagu

SEQ ID NO: 1088 - RNA, 10 nt, Unknown
  source: /note="Description of Unknown: Exemplary gene or splice site sequence"
caaguuucca

SEQ ID NO: 1089 - RNA, 10 nt, Unknown
  source: /note="Description of Unknown: Exemplary gene or splice site sequence"
caaguuuguu

SEQ ID NO: 1090 - RNA, 10 nt, Unknown
  source: /note="Description of Unknown: Exemplary gene or splice site sequence"
cacguaagag

SEQ ID NO: 1091 - RNA, 10 nt, Unknown
  source: /note="Description of Unknown: Exemplary gene or splice site sequence"
cacguaagca

SEQ ID NO: 1092 - RNA, 10 nt, Unknown
  source: /note="Description of Unknown: Exemplary gene or splice site sequence"
cacguaauug

SEQ ID NO: 1093 - RNA, 10 nt, Unknown
  source: /note="Description of Unknown: Exemplary gene or splice site sequence"
cacguaggac

SEQ ID NO: 1094 - RNA, 10 nt, Unknown
  source: /note="Description of Unknown: Exemplary gene or splice site sequence"
cacguaucga

SEQ ID NO: 1095 - RNA, 10 nt, Unknown
  source: /note="Description of Unknown: Exemplary gene or splice site sequence"
cacgucaguu

SEQ ID NO: 1096 - RNA, 10 nt, Unknown
  source: /note="Description of Unknown: Exemplary gene or splice site sequence"
cacgugagcu

SEQ ID NO: 1097 - RNA, 10 nt, Unknown
  source: /note="Description of Unknown: Exemplary gene or splice site sequence"
cacgugaguc

SEQ ID NO: 1098 - RNA, 10 nt, Unknown
  source: /note="Description of Unknown: Exemplary gene or splice site sequence"
cacgugagug

SEQ ID NO: 1099 - RNA, 10 nt, Unknown
  source: /note="Description of Unknown: Exemplary gene or splice site sequence"
caggcaagaa

SEQ ID NO: 1100 - RNA, 10 nt, Unknown
  source: /note="Description of Unknown: Exemplary gene or splice site sequence"
caggcaagac

SEQ ID NO: 1101 - RNA, 10 nt, Unknown
  source: /note="Description of Unknown: Exemplary gene or splice site sequence"
caggcaagag

SEQ ID NO: 1102 - RNA, 10 nt, Unknown
  source: /note="Description of Unknown: Exemplary gene or splice site sequence"
caggcaagga

SEQ ID NO: 1103 - RNA, 10 nt, Unknown
  source: /note="Description of Unknown: Exemplary gene or splice site sequence"
caggcaagua

SEQ ID NO: 1104 - RNA, 10 nt, Unknown
  source: /note="Description of Unknown: Exemplary gene or splice site sequence"
caggcaagug

SEQ ID NO: 1105 - RNA, 10 nt, Unknown
  source: /note="Description of Unknown: Exemplary gene or splice site sequence"
caggcaaguu

SEQ ID NO: 1106 - RNA, 10 nt, Unknown
  source: /note="Description of Unknown: Exemplary gene or splice site sequence"
caggcacgca

SEQ ID NO: 1107 - RNA, 10 nt, Unknown
  source: /note="Description of Unknown: Exemplary gene or splice site sequence"
caggcagagg

SEQ ID NO: 1108 - RNA, 10 nt, Unknown
  source: /note="Description of Unknown: Exemplary gene or splice site sequence"
caggcaggug

SEQ ID NO: 1109 - RNA, 10 nt, Unknown
  source: /note="Description of Unknown: Exemplary gene or splice site sequence"
caggcaucau

SEQ ID NO: 1110 - RNA, 10 nt, Unknown
  source: /note="Description of Unknown: Exemplary gene or splice site sequence"
caggcaugaa

SEQ ID NO: 1111 - RNA, 10 nt, Unknown
  source: /note="Description of Unknown: Exemplary gene or splice site sequence"
caggcaugag

SEQ ID NO: 1112 - RNA, 10 nt, Unknown
  source: /note="Description of Unknown: Exemplary gene or splice site sequence"
caggcaugca

SEQ ID NO: 1113 - RNA, 10 nt, Unknown
  source: /note="Description of Unknown: Exemplary gene or splice site sequence"
caggcaugcg

SEQ ID NO: 1114 - RNA, 10 nt, Unknown
  source: /note="Description of Unknown: Exemplary gene or splice site sequence"
caggcaugug

SEQ ID NO: 1115 - RNA, 10 nt, Unknown
  source: /note="Description of Unknown: Exemplary gene or splice site sequence"
caggcgagag

SEQ ID NO: 1116 - RNA, 10 nt, Unknown
  source: /note="Description of Unknown: Exemplary gene or splice site sequence"
caggcgccug

SEQ ID NO: 1117 - RNA, 10 nt, Unknown
  source: /note="Description of Unknown: Exemplary gene or splice site sequence"
caggcgugug

SEQ ID NO: 1118 - RNA, 10 nt, Unknown
  source: /note="Description of Unknown: Exemplary gene or splice site sequence"
cagguaaaaa

SEQ ID NO: 1119 - RNA, 10 nt, Unknown
  source: /note="Description of Unknown: Exemplary gene or splice site sequence"
cagguaaaag

SEQ ID NO: 1120 - RNA, 10 nt, Unknown
  source: /note="Description of Unknown: Exemplary gene or splice site sequence"
cagguaaaca

SEQ ID NO: 1121 - RNA, 10 nt, Unknown
  source: /note="Description of Unknown: Exemplary gene or splice site sequence"
cagguaaacc

SEQ ID NO: 1122 - RNA, 10 nt, Unknown
  source: /note="Description of Unknown: Exemplary gene or splice site sequence"
cagguaaaga

SEQ ID NO: 1123 - RNA, 10 nt, Unknown
  source: /note="Description of Unknown: Exemplary gene or splice site sequence"
cagguaaagc

SEQ ID NO: 1124 - RNA, 10 nt, Unknown
  source: /note="Description of Unknown: Exemplary gene or splice site sequence"
cagguaaagu

SEQ ID NO: 1125 - RNA, 10 nt, Unknown
  source: /note="Description of Unknown: Exemplary gene or splice site sequence"
cagguaaaua

SEQ ID NO: 1126 - RNA, 10 nt, Unknown
  source: /note="Description of Unknown: Exemplary gene or splice site sequence"
cagguaaauc

SEQ ID NO: 1127 - RNA, 10 nt, Unknown
  source: /note="Description of Unknown: Exemplary gene or splice site sequence"
cagguaaaug

SEQ ID NO: 1128 - RNA, 10 nt, Unknown
  source: /note="Description of Unknown: Exemplary gene or splice site sequence"
cagguaaauu

SEQ ID NO: 1129 - RNA, 10 nt, Unknown
  source: /note="Description of Unknown: Exemplary gene or splice site sequence"
cagguaacag

SEQ ID NO: 1130 - RNA, 10 nt, Unknown
  source: /note="Description of Unknown: Exemplary gene or splice site sequence"
cagguaacau

SEQ ID NO: 1131 - RNA, 10 nt, Unknown
  source: /note="Description of Unknown: Exemplary gene or splice site sequence"
cagguaacca

SEQ ID NO: 1132 - RNA, 10 nt, Unknown
  source: /note="Description of Unknown: Exemplary gene or splice site sequence"
cagguaaccg

SEQ ID NO: 1133 - RNA, 10 nt, Unknown
  source: /note="Description of Unknown: Exemplary gene or splice site sequence"
cagguaacgu

SEQ ID NO: 1134 - RNA, 10 nt, Unknown
  source: /note="Description of Unknown: Exemplary gene or splice site sequence"
cagguaacua

SEQ ID NO: 1135 - RNA, 10 nt, Unknown
  source: /note="Description of Unknown: Exemplary gene or splice site sequence"
cagguaacuc

SEQ ID NO: 1136 - RNA, 10 nt, Unknown
  source: /note="Description of Unknown: Exemplary gene or splice site sequence"
cagguaacug

SEQ ID NO: 1137 - RNA, 10 nt, Unknown
  source: /note="Description of Unknown: Exemplary gene or splice site sequence"
cagguaacuu

SEQ ID NO: 1138 - RNA, 10 nt, Unknown
  source: /note="Description of Unknown: Exemplary gene or splice site sequence"
cagguaagaa

SEQ ID NO: 1139 - RNA, 10 nt, Unknown
  source: /note="Description of Unknown: Exemplary gene or splice site sequence"
cagguaagac

SEQ ID NO: 1140 - RNA, 10 nt, Unknown
  source: /note="Description of Unknown: Exemplary gene or splice site sequence"
cagguaagag

SEQ ID NO: 1141 - RNA, 10 nt, Unknown
  source: /note="Description of Unknown: Exemplary gene or splice site sequence"
cagguaagau

SEQ ID NO: 1142 - RNA, 10 nt, Unknown
  source: /note="Description of Unknown: Exemplary gene or splice site sequence"
cagguaagcc

SEQ ID NO: 1143 - RNA, 10 nt, Unknown
  source: /note="Description of Unknown: Exemplary gene or splice site sequence"
cagguaagga

SEQ ID NO: 1144 - RNA, 10 nt, Unknown
  source: /note="Description of Unknown: Exemplary gene or splice site sequence"
cagguaaggc

SEQ ID NO: 1145 - RNA, 10 nt, Unknown
  source: /note="Description of Unknown: Exemplary gene or splice site sequence"
cagguaaggg

SEQ ID NO: 1146 - RNA, 10 nt, Unknown
  source: /note="Description of Unknown: Exemplary gene or splice site sequence"
cagguaaggu

SEQ ID NO: 1147 - RNA, 10 nt, Unknown
  source: /note="Description of Unknown: Exemplary gene or splice site sequence"
cagguaagua

SEQ ID NO: 1148 - RNA, 10 nt, Unknown
  source: /note="Description of Unknown: Exemplary gene or splice site sequence"
cagguaagug

SEQ ID NO: 1149 - RNA, 10 nt, Unknown
  source: /note="Description of Unknown: Exemplary gene or splice site sequence"
cagguaaguu

SEQ ID NO: 1150 - RNA, 10 nt, Unknown
  source: /note="Description of Unknown: Exemplary gene or splice site sequence"
cagguaauaa

SEQ ID NO: 1151 - RNA, 10 nt, Unknown
  source: /note="Description of Unknown: Exemplary gene or splice site sequence"
cagguaauau

SEQ ID NO: 1152 - RNA, 10 nt, Unknown
  source: /note="Description of Unknown: Exemplary gene or splice site sequence"
cagguaaucc

SEQ ID NO: 1153 - RNA, 10 nt, Unknown
  source: /note="Description of Unknown: Exemplary gene or splice site sequence"
cagguaaugc

SEQ ID NO: 1154 - RNA, 10 nt, Unknown
  source: /note="Description of Unknown: Exemplary gene or splice site sequence"
cagguaaugg

SEQ ID NO: 1155 - RNA, 10 nt, Unknown
  source: /note="Description of Unknown: Exemplary gene or splice site sequence"
cagguaaugu

SEQ ID NO: 1156 - RNA, 10 nt, Unknown
  source: /note="Description of Unknown: Exemplary gene or splice site sequence"
cagguaauua

SEQ ID NO: 1157 - RNA, 10 nt, Unknown
  source: /note="Description of Unknown: Exemplary gene or splice site sequence"
cagguaauuc

SEQ ID NO: 1158 - RNA, 10 nt, Unknown
  source: /note="Description of Unknown: Exemplary gene or splice site sequence"
cagguaauug

SEQ ID NO: 1159 - RNA, 10 nt, Unknown
  source: /note="Description of Unknown: Exemplary gene or splice site sequence"
cagguaauuu

SEQ ID NO: 1160 - RNA, 10 nt, Unknown
  source: /note="Description of Unknown: Exemplary gene or splice site sequence"
cagguacaaa

SEQ ID NO: 1161 - RNA, 10 nt, Unknown
  source: /note="Description of Unknown: Exemplary gene or splice site sequence"
cagguacaag

SEQ ID NO: 1162 - RNA, 10 nt, Unknown
  source: /note="Description of Unknown: Exemplary gene or splice site sequence"
cagguacaau

SEQ ID NO: 1163 - RNA, 10 nt, Unknown
  source: /note="Description of Unknown: Exemplary gene or splice site sequence"
cagguacaca

SEQ ID NO: 1164 - RNA, 10 nt, Unknown
  source: /note="Description of Unknown: Exemplary gene or splice site sequence"
cagguacacg

SEQ ID NO: 1165 - RNA, 10 nt, Unknown
  source: /note="Description of Unknown: Exemplary gene or splice site sequence"
cagguacaga

SEQ ID NO: 1166 - RNA, 10 nt, Unknown
  source: /note="Description of Unknown: Exemplary gene or splice site sequence"
cagguacagg

SEQ ID NO: 1167 - RNA, 10 nt, Unknown
  source: /note="Description of Unknown: Exemplary gene or splice site sequence"
cagguacagu

SEQ ID NO: 1168 - RNA, 10 nt, Unknown
  source: /note="Description of Unknown: Exemplary gene or splice site sequence"
cagguacaua

SEQ ID NO: 1169 - RNA, 10 nt, Unknown
  source: /note="Description of Unknown: Exemplary gene or splice site sequence"
cagguacaug

SEQ ID NO: 1170 - RNA, 10 nt, Unknown
  source: /note="Description of Unknown: Exemplary gene or splice site sequence"
cagguacauu

SEQ ID NO: 1171 - RNA, 10 nt, Unknown
  source: /note="Description of Unknown: Exemplary gene or splice site sequence"
cagguaccac

SEQ ID NO: 1172 - RNA, 10 nt, Unknown
  source: /note="Description of Unknown: Exemplary gene or splice site sequence"
cagguaccca

SEQ ID NO: 1173 - RNA, 10 nt, Unknown
  source: /note="Description of Unknown: Exemplary gene or splice site sequence"
cagguacccg

SEQ ID NO: 1174 - RNA, 10 nt, Unknown
  source: /note="Description of Unknown: Exemplary gene or splice site sequence"
cagguacccu

SEQ ID NO: 1175 - RNA, 10 nt, Unknown
  source: /note="Description of Unknown: Exemplary gene or splice site sequence"
cagguaccgc

SEQ ID NO: 1176 - RNA, 10 nt, Unknown
  source: /note="Description of Unknown: Exemplary gene or splice site sequence"
cagguaccgg

SEQ ID NO: 1177 - RNA, 10 nt, Unknown
  source: /note="Description of Unknown: Exemplary gene or splice site sequence"
cagguaccuc

SEQ ID NO: 1178 - RNA, 10 nt, Unknown
  source: /note="Description of Unknown: Exemplary gene or splice site sequence"
cagguaccug

SEQ ID NO: 1179 - RNA, 10 nt, Unknown
  source: /note="Description of Unknown: Exemplary gene or splice site sequence"
cagguaccuu

SEQ ID NO: 1180 - RNA, 10 nt, Unknown
  source: /note="Description of Unknown: Exemplary gene or splice site sequence"
cagguacgag

SEQ ID NO: 1181 - RNA, 10 nt, Unknown
  source: /note="Description of Unknown: Exemplary gene or splice site sequence"
cagguacgca

SEQ ID NO: 1182 - RNA, 10 nt, Unknown
  source: /note="Description of Unknown: Exemplary gene or splice site sequence"
cagguacgcc

SEQ ID NO: 1183 - RNA, 10 nt, Unknown
  source: /note="Description of Unknown: Exemplary gene or splice site sequence"
cagguacggu

SEQ ID NO: 1184 - RNA, 10 nt, Unknown
  source: /note="Description of Unknown: Exemplary gene or splice site sequence"
cagguacgua

SEQ ID NO: 1185 - RNA, 10 nt, Unknown
  source: /note="Description of Unknown: Exemplary gene or splice site sequence"
cagguacgug

SEQ ID NO: 1186 - RNA, 10 nt, Unknown
  source: /note="Description of Unknown: Exemplary gene or splice site sequence"
cagguacuaa

SEQ ID NO: 1187 - RNA, 10 nt, Unknown
  source: /note="Description of Unknown: Exemplary gene or splice site sequence"
cagguacuag

SEQ ID NO: 1188 - RNA, 10 nt, Unknown
  source: /note="Description of Unknown: Exemplary gene or splice site sequence"
cagguacuau

SEQ ID NO: 1189 - RNA, 10 nt, Unknown
  source: /note="Description of Unknown: Exemplary gene or splice site sequence"
cagguacucc

SEQ ID NO: 1190 - RNA, 10 nt, Unknown
  source: /note="Description of Unknown: Exemplary gene or splice site sequence"
cagguacucu

SEQ ID NO: 1191 - RNA, 10 nt, Unknown
  source: /note="Description of Unknown: Exemplary gene or splice site sequence"
cagguacuga

SEQ ID NO: 1192 - RNA, 10 nt, Unknown
  source: /note="Description of Unknown: Exemplary gene or splice site sequence"
cagguacugc

SEQ ID NO: 1193 - RNA, 10 nt, Unknown
  source: /note="Description of Unknown: Exemplary gene or splice site sequence"
cagguacugu

SEQ ID NO: 1194 - RNA, 10 nt, Unknown
  source: /note="Description of Unknown: Exemplary gene or splice site sequence"
cagguacuua

SEQ ID NO: 1195 - RNA, 10 nt, Unknown
  source: /note="Description of Unknown: Exemplary gene or splice site sequence"
cagguacuuu

SEQ ID NO: 1196 - RNA, 10 nt, Unknown
  source: /note="Description of Unknown: Exemplary gene or splice site sequence"
cagguagaaa

SEQ ID NO: 1197 - RNA, 10 nt, Unknown
  source: /note="Description of Unknown: Exemplary gene or splice site sequence"
cagguagaac

SEQ ID NO: 1198 - RNA, 10 nt, Unknown
  source: /note="Description of Unknown: Exemplary gene or splice site sequence"
cagguagaag

SEQ ID NO: 1199 - RNA, 10 nt, Unknown
  source: /note="Description of Unknown: Exemplary gene or splice site sequence"
cagguagaca

SEQ ID NO: 1200 - RNA, 10 nt, Unknown
  source: /note="Description of Unknown: Exemplary gene or splice site sequence"
cagguagacc

SEQ ID NO: 1201 - RNA, 10 nt, Unknown
  source: /note="Description of Unknown: Exemplary gene or splice site sequence"
cagguagaga

SEQ ID NO: 1202 - RNA, 10 nt, Unknown
  source: /note="Description of Unknown: Exemplary gene or splice site sequence"
cagguagauu

SEQ ID NO: 1203 - RNA, 10 nt, Unknown
  source: /note="Description of Unknown: Exemplary gene or splice site sequence"
cagguagcaa

SEQ ID NO: 1204 - RNA, 10 nt, Unknown
  source: /note="Description of Unknown: Exemplary gene or splice site sequence"
cagguagcac

SEQ ID NO: 1205 - RNA, 10 nt, Unknown
  source: /note="Description of Unknown: Exemplary gene or splice site sequence"
cagguagcag

SEQ ID NO: 1206 - RNA, 10 nt, Unknown
  source: /note="Description of Unknown: Exemplary gene or splice site sequence"
cagguagcca

SEQ ID NO: 1207 - RNA, 10 nt, Unknown
  source: /note="Description of Unknown: Exemplary gene or splice site sequence"
cagguagcgu

SEQ ID NO: 1208 - RNA, 10 nt, Unknown
  source: /note="Description of Unknown: Exemplary gene or splice site sequence"
cagguagcua

SEQ ID NO: 1209 - RNA, 10 nt, Unknown
  source: /note="Description of Unknown: Exemplary gene or splice site sequence"
cagguagcuc

SEQ ID NO: 1210 - RNA, 10 nt, Unknown
  source: /note="Description of Unknown: Exemplary gene or splice site sequence"
cagguagcug

SEQ ID NO: 1211 - RNA, 10 nt, Unknown
  source: /note="Description of Unknown: Exemplary gene or splice site sequence"
cagguagcuu

SEQ ID NO: 1212 - RNA, 10 nt, Unknown
  source: /note="Description of Unknown: Exemplary gene or splice site sequence"
cagguaggaa

SEQ ID NO: 1213 - RNA, 10 nt, Unknown
  source: /note="Description of Unknown: Exemplary gene or splice site sequence"
cagguaggac

SEQ ID NO: 1214 - RNA, 10 nt, Unknown
  source: /note="Description of Unknown: Exemplary gene or splice site sequence"
cagguaggag

SEQ ID NO: 1215 - RNA, 10 nt, Unknown
  source: /note="Description of Unknown: Exemplary gene or splice site sequence"
cagguaggca

SEQ ID NO: 1216 - RNA, 10 nt, Unknown
  source: /note="Description of Unknown: Exemplary gene or splice site sequence"
cagguaggga

SEQ ID NO: 1217 - RNA, 10 nt, Unknown
  source: /note="Description of Unknown: Exemplary gene or splice site sequence"
cagguagggc

SEQ ID NO: 1218 - RNA, 10 nt, Unknown
  source: /note="Description of Unknown: Exemplary gene or splice site sequence"
cagguagggg

SEQ ID NO: 1219 - RNA, 10 nt, Unknown
  source: /note="Description of Unknown: Exemplary gene or splice site sequence"
cagguagggu

SEQ ID NO: 1220 - RNA, 10 nt, Unknown
  source: /note="Description of Unknown: Exemplary gene or splice site sequence"
cagguaggua

SEQ ID NO: 1221 - RNA, 10 nt, Unknown
  source: /note="Description of Unknown: Exemplary gene or splice site sequence"
cagguagguc

SEQ ID NO: 1222 - RNA, 10 nt, Unknown
  source: /note="Description of Unknown: Exemplary gene or splice site sequence"
cagguaggug

SEQ ID NO: 1223 - RNA, 10 nt, Unknown
  source: /note="Description of Unknown: Exemplary gene or splice site sequence"
cagguagguu

SEQ ID NO: 1224 - RNA, 10 nt, Unknown
  source: /note="Description of Unknown: Exemplary gene or splice site sequence"
cagguaguaa

SEQ ID NO: 1225 - RNA, 10 nt, Unknown
  source: /note="Description of Unknown: Exemplary gene or splice site sequence"
cagguaguau

SEQ ID NO: 1226 - RNA, 10 nt, Unknown
  source: /note="Description of Unknown: Exemplary gene or splice site sequence"
cagguaguca

SEQ ID NO: 1227 - RNA, 10 nt, Unknown
  source: /note="Description of Unknown: Exemplary gene or splice site sequence"
cagguagucc

SEQ ID NO: 1228 - RNA, 10 nt, Unknown
  source: /note="Description of Unknown: Exemplary gene or splice site sequence"
cagguaguga

SEQ ID NO: 1229 - RNA, 10 nt, Unknown
  source: /note="Description of Unknown: Exemplary gene or splice site sequence"
cagguagugu

SEQ ID NO: 1230 - RNA, 10 nt, Unknown
  source: /note="Description of Unknown: Exemplary gene or splice site sequence"
cagguaguuc

SEQ ID NO: 1231 - RNA, 10 nt, Unknown
  source: /note="Description of Unknown: Exemplary gene or splice site sequence"
cagguaguug

SEQ ID NO: 1232 - RNA, 10 nt, Unknown
  source: /note="Description of Unknown: Exemplary gene or splice site sequence"
cagguaguuu

SEQ ID NO: 1233 - RNA, 10 nt, Unknown
  source: /note="Description of Unknown: Exemplary gene or splice site sequence"
cagguauaag

SEQ ID NO: 1234 - RNA, 10 nt, Unknown
  source: /note="Description of Unknown: Exemplary gene or splice site sequence"
cagguauaca

SEQ ID NO: 1235 - RNA, 10 nt, Unknown
  source: /note="Description of Unknown: Exemplary gene or splice site sequence"
cagguauaga

SEQ ID NO: 1236 - RNA, 10 nt, Unknown
  source: /note="Description of Unknown: Exemplary gene or splice site sequence"
cagguauauc

SEQ ID NO: 1237 - RNA, 10 nt, Unknown
  source: /note="Description of Unknown: Exemplary gene or splice site sequence"
cagguauaug

SEQ ID NO: 1238 - RNA, 10 nt, Unknown
  source: /note="Description of Unknown: Exemplary gene or splice site sequence"
cagguauauu

SEQ ID NO: 1239 - RNA, 10 nt, Unknown
  source: /note="Description of Unknown: Exemplary gene or splice site sequence"
cagguaucag

SEQ ID NO: 1240 - RNA, 10 nt, Unknown
  source: /note="Description of Unknown: Exemplary gene or splice site sequence"
cagguaucau

SEQ ID NO: 1241 - RNA, 10 nt, Unknown
  source: /note="Description of Unknown: Exemplary gene or splice site sequence"
cagguauccu

SEQ ID NO: 1242 - RNA, 10 nt, Unknown
  source: /note="Description of Unknown: Exemplary gene or splice site sequence"
cagguaucga

SEQ ID NO: 1243 - RNA, 10 nt, Unknown
  source: /note="Description of Unknown: Exemplary gene or splice site sequence"
cagguaucgc

SEQ ID NO: 1244 - RNA, 10 nt, Unknown
  source: /note="Description of Unknown: Exemplary gene or splice site sequence"
cagguaucua

SEQ ID NO: 1245 - RNA, 10 nt, Unknown
  source: /note="Description of Unknown: Exemplary gene or splice site sequence"
cagguaucug

SEQ ID NO: 1246 - RNA, 10 nt, Unknown
  source: /note="Description of Unknown: Exemplary gene or splice site sequence"
cagguaucuu

SEQ ID NO: 1247 - RNA, 10 nt, Unknown
  source: /note="Description of Unknown: Exemplary gene or splice site sequence"
cagguaugaa

SEQ ID NO: 1248 - RNA, 10 nt, Unknown
  source: /note="Description of Unknown: Exemplary gene or splice site sequence"
cagguaugac

SEQ ID NO: 1249 - RNA, 10 nt, Unknown
  source: /note="Description of Unknown: Exemplary gene or splice site sequence"
cagguaugag

SEQ ID NO: 1250 - RNA, 10 nt, Unknown
  source: /note="Description of Unknown: Exemplary gene or splice site sequence"
cagguaugau

SEQ ID NO: 1251 - RNA, 10 nt, Unknown
  source: /note="Description of Unknown: Exemplary gene or splice site sequence"
cagguaugca

SEQ ID NO: 1252 - RNA, 10 nt, Unknown
  source: /note="Description of Unknown: Exemplary gene or splice site sequence"
cagguaugcc

SEQ ID NO: 1253 - RNA, 10 nt, Unknown
  source: /note="Description of Unknown: Exemplary gene or splice site sequence"
cagguaugcg

SEQ ID NO: 1254 - RNA, 10 nt, Unknown
  source: /note="Description of Unknown: Exemplary gene or splice site sequence"
cagguaugcu

SEQ ID NO: 1255 - RNA, 10 nt, Unknown
  source: /note="Description of Unknown: Exemplary gene or splice site sequence"
cagguaugga

SEQ ID NO: 1256 - RNA, 10 nt, Unknown
  source: /note="Description of Unknown: Exemplary gene or splice site sequence"
cagguauggg

SEQ ID NO: 1257 - RNA, 10 nt, Unknown
  source: /note="Description of Unknown: Exemplary gene or splice site sequence"
cagguauggu

SEQ ID NO: 1258 - RNA, 10 nt, Unknown
  source: /note="Description of Unknown: Exemplary gene or splice site sequence"
cagguaugua

SEQ ID NO: 1259 - RNA, 10 nt, Unknown
  source: /note="Description of Unknown: Exemplary gene or splice site sequence"
cagguauguc

SEQ ID NO: 1260 - RNA, 10 nt, Unknown
  source: /note="Description of Unknown: Exemplary gene or splice site sequence"
cagguaugug

SEQ ID NO: 1261 - RNA, 10 nt, Unknown
  source: /note="Description of Unknown: Exemplary gene or splice site sequence"
cagguauguu

SEQ ID NO: 1262 - RNA, 10 nt, Unknown
  source: /note="Description of Unknown: Exemplary gene or splice site sequence"
cagguauuau

SEQ ID NO: 1263 - RNA, 10 nt, Unknown
  source: /note="Description of Unknown: Exemplary gene or splice site sequence"
cagguauuca

SEQ ID NO: 1264 - RNA, 10 nt, Unknown
  source: /note="Description of Unknown: Exemplary gene or splice site sequence"
cagguauucu

SEQ ID NO: 1265 - RNA, 10 nt, Unknown
  source: /note="Description of Unknown: Exemplary gene or splice site sequence"
cagguauuga

SEQ ID NO: 1266 - RNA, 10 nt, Unknown
  source: /note="Description of Unknown: Exemplary gene or splice site sequence"
cagguauugg

SEQ ID NO: 1267 - RNA, 10 nt, Unknown
  source: /note="Description of Unknown: Exemplary gene or splice site sequence"
cagguauugu

SEQ ID NO: 1268 - RNA, 10 nt, Unknown
  source: /note="Description of Unknown: Exemplary gene or splice site sequence"
cagguauuua

SEQ ID NO: 1269 - RNA, 10 nt, Unknown
  source: /note="Description of Unknown: Exemplary gene or splice site sequence"
cagguauuuc

SEQ ID NO: 1270 - RNA, 10 nt, Unknown
  source: /note="Description of Unknown: Exemplary gene or splice site sequence"
cagguauuug

SEQ ID NO: 1271 - RNA, 10 nt, Unknown
  source: /note="Description of Unknown: Exemplary gene or splice site sequence"
cagguauuuu

SEQ ID NO: 1272 - RNA, 10 nt, Unknown
  source: /note="Description of Unknown: Exemplary gene or splice site sequence"
caggucaaca

SEQ ID NO: 1273 - RNA, 10 nt, Unknown
  source: /note="Description of Unknown: Exemplary gene or splice site sequence"
caggucaaug

SEQ ID NO: 1274 - RNA, 10 nt, Unknown
  source: /note="Description of Unknown: Exemplary gene or splice site sequence"
caggucacgu

SEQ ID NO: 1275 - RNA, 10 nt, Unknown
  source: /note="Description of Unknown: Exemplary gene or splice site sequence"
caggucagaa

SEQ ID NO: 1276 - RNA, 10 nt, Unknown
  source: /note="Description of Unknown: Exemplary gene or splice site sequence"
caggucagac

SEQ ID NO: 1277 - RNA, 10 nt, Unknown
  source: /note="Description of Unknown: Exemplary gene or splice site sequence"
caggucagca

SEQ ID NO: 1278 - RNA, 10 nt, Unknown
  source: /note="Description of Unknown: Exemplary gene or splice site sequence"
caggucagcc

SEQ ID NO: 1279 - RNA, 10 nt, Unknown
  source: /note="Description of Unknown: Exemplary gene or splice site sequence"
caggucagcg

SEQ ID NO: 1280 - RNA, 10 nt, Unknown
  source: /note="Description of Unknown: Exemplary gene or splice site sequence"
caggucagga

SEQ ID NO: 1281 - RNA, 10 nt, Unknown
  source: /note="Description of Unknown: Exemplary gene or splice site sequence"
caggucagua

SEQ ID NO: 1282 - RNA, 10 nt, Unknown
  source: /note="Description of Unknown: Exemplary gene or splice site sequence"
caggucaguc

SEQ ID NO: 1283 - RNA, 10 nt, Unknown
  source: /note="Description of Unknown: Exemplary gene or splice site sequence"
caggucagug

SEQ ID NO: 1284 - RNA, 10 nt, Unknown
  source: /note="Description of Unknown: Exemplary gene or splice site sequence"
caggucaguu

SEQ ID NO: 1285 - RNA, 10 nt, Unknown
  source: /note="Description of Unknown: Exemplary gene or splice site sequence"
caggucaucc

SEQ ID NO: 1286 - RNA, 10 nt, Unknown
  source: /note="Description of Unknown: Exemplary gene or splice site sequence"
caggucaugc

SEQ ID NO: 1287 - RNA, 10 nt, Unknown
  source: /note="Description of Unknown: Exemplary gene or splice site sequence"
caggucauua

SEQ ID NO: 1288 - RNA, 10 nt, Unknown
  source: /note="Description of Unknown: Exemplary gene or splice site sequence"
caggucauuu

SEQ ID NO: 1289 - RNA, 10 nt, Unknown
  source: /note="Description of Unknown: Exemplary gene or splice site sequence"
cagguccacc

SEQ ID NO: 1290 - RNA, 10 nt, Unknown
  source: /note="Description of Unknown: Exemplary gene or splice site sequence"
cagguccacu

SEQ ID NO: 1291 - RNA, 10 nt, Unknown
  source: /note="Description of Unknown: Exemplary gene or splice site sequence"
cagguccagu

SEQ ID NO: 1292 - RNA, 10 nt, Unknown
  source: /note="Description of Unknown: Exemplary gene or splice site sequence"
cagguccauc

SEQ ID NO: 1293 - RNA, 10 nt, Unknown
  source: /note="Description of Unknown: Exemplary gene or splice site sequence"
cagguccauu

SEQ ID NO: 1294 - RNA, 10 nt, Unknown
  source: /note="Description of Unknown: Exemplary gene or splice site sequence"
caggucccag

SEQ ID NO: 1295 - RNA, 10 nt, Unknown
  source: /note="Description of Unknown: Exemplary gene or splice site sequence"
caggucccug

SEQ ID NO: 1296 - RNA, 10 nt, Unknown
  source: /note="Description of Unknown: Exemplary gene or splice site sequence"
cagguccuga

SEQ ID NO: 1297 - RNA, 10 nt, Unknown
  source: /note="Description of Unknown: Exemplary gene or splice site sequence"
cagguccugc

SEQ ID NO: 1298 - RNA, 10 nt, Unknown
  source: /note="Description of Unknown: Exemplary gene or splice site sequence"
cagguccugg

SEQ ID NO: 1299 - RNA, 10 nt, Unknown
  source: /note="Description of Unknown: Exemplary gene or splice site sequence"
caggucggcc

SEQ ID NO: 1300 - RNA, 10 nt, Unknown
  source: /note="Description of Unknown: Exemplary gene or splice site sequence"
caggucggug

SEQ ID NO: 1301 - RNA, 10 nt, Unknown
  source: /note="Description of Unknown: Exemplary gene or splice site sequence"
caggucguug

SEQ ID NO: 1302 - RNA, 10 nt, Unknown
  source: /note="Description of Unknown: Exemplary gene or splice site sequence"
caggucucuc

SEQ ID NO: 1303 - RNA, 10 nt, Unknown
  source: /note="Description of Unknown: Exemplary gene or splice site sequence"
caggucucuu

SEQ ID NO: 1304 - RNA, 10 nt, Unknown
  source: /note="Description of Unknown: Exemplary gene or splice site sequence"
caggucugag

SEQ ID NO: 1305 - RNA, 10 nt, Unknown
  source: /note="Description of Unknown: Exemplary gene or splice site sequence"
caggucugcc

SEQ ID NO: 1306 - RNA, 10 nt, Unknown
  source: /note="Description of Unknown: Exemplary gene or splice site sequence"
caggucugcg

SEQ ID NO: 1307 - RNA, 10 nt, Unknown
  source: /note="Description of Unknown: Exemplary gene or splice site sequence"
caggucugga

SEQ ID NO: 1308 - RNA, 10 nt, Unknown
  source: /note="Description of Unknown: Exemplary gene or splice site sequence"
caggucuggu

SEQ ID NO: 1309 - RNA, 10 nt, Unknown
  source: /note="Description of Unknown: Exemplary gene or splice site sequence"
caggucugua

SEQ ID NO: 1310 - RNA, 10 nt, Unknown
  source: /note="Description of Unknown: Exemplary gene or splice site sequence"
caggucuguc

SEQ ID NO: 1311 - RNA, 10 nt, Unknown
  source: /note="Description of Unknown: Exemplary gene or splice site sequence"
caggucugug

SEQ ID NO: 1312 - RNA, 10 nt, Unknown
  source: /note="Description of Unknown: Exemplary gene or splice site sequence"
caggucuguu

SEQ ID NO: 1313 - RNA, 10 nt, Unknown
  source: /note="Description of Unknown: Exemplary gene or splice site sequence"
caggucuucc

SEQ ID NO: 1314 - RNA, 10 nt, Unknown
  source: /note="Description of Unknown: Exemplary gene or splice site sequence"
caggucuuuc

SEQ ID NO: 1315 - RNA, 10 nt, Unknown
  source: /note="Description of Unknown: Exemplary gene or splice site sequence"
caggugaaag

SEQ ID NO: 1316 - RNA, 10 nt, Unknown
  source: /note="Description of Unknown: Exemplary gene or splice site sequence"
caggugaaau

SEQ ID NO: 1317 - RNA, 10 nt, Unknown
  source: /note="Description of Unknown: Exemplary gene or splice site sequence"
caggugaaca

SEQ ID NO: 1318 - RNA, 10 nt, Unknown
  source: /note="Description of Unknown: Exemplary gene or splice site sequence"
caggugaaga

SEQ ID NO: 1319 - RNA, 10 nt, Unknown
  source: /note="Description of Unknown: Exemplary gene or splice site sequence"
caggugaagg

SEQ ID NO: 1320 - RNA, 10 nt, Unknown
  source: /note="Description of Unknown: Exemplary gene or splice site sequence"
caggugaaua

SEQ ID NO: 1321 - RNA, 10 nt, Unknown
  source: /note="Description of Unknown: Exemplary gene or splice site sequence"
caggugaauc

SEQ ID NO: 1322 - RNA, 10 nt, Unknown
  source: /note="Description of Unknown: Exemplary gene or splice site sequence"
caggugaauu

SEQ ID NO: 1323 - RNA, 10 nt, Unknown
  source: /note="Description of Unknown: Exemplary gene or splice site sequence"
caggugacaa

SEQ ID NO: 1324 - RNA, 10 nt, Unknown
  source: /note="Description of Unknown: Exemplary gene or splice site sequence"
caggugacau

SEQ ID NO: 1325 - RNA, 10 nt, Unknown
  source: /note="Description of Unknown: Exemplary gene or splice site sequence"
caggugacca

SEQ ID NO: 1326 - RNA, 10 nt, Unknown
  source: /note="Description of Unknown: Exemplary gene or splice site sequence"
caggugaccc

SEQ ID NO: 1327 - RNA, 10 nt, Unknown
  source: /note="Description of Unknown: Exemplary gene or splice site sequence"
caggugaccg

SEQ ID NO: 1328 - RNA, 10 nt, Unknown
  source: /note="Description of Unknown: Exemplary gene or splice site sequence"
caggugaccu

SEQ ID NO: 1329 - RNA, 10 nt, Unknown
  source: /note="Description of Unknown: Exemplary gene or splice site sequence"
caggugacgg

SEQ ID NO: 1330 - RNA, 10 nt, Unknown
  source: /note="Description of Unknown: Exemplary gene or splice site sequence"
caggugacua

SEQ ID NO: 1331 - RNA, 10 nt, Unknown
  source: /note="Description of Unknown: Exemplary gene or splice site sequence"
caggugacuc

SEQ ID NO: 1332 - RNA, 10 nt, Unknown
  source: /note="Description of Unknown: Exemplary gene or splice site sequence"
caggugacug

SEQ ID NO: 1333 - RNA, 10 nt, Unknown
  source: /note="Description of Unknown: Exemplary gene or splice site sequence"
caggugagaa

SEQ ID NO: 1334 - RNA, 10 nt, Unknown
  source: /note="Description of Unknown: Exemplary gene or splice site sequence"
caggugagac

SEQ ID NO: 1335 - RNA, 10 nt, Unknown
  source: /note="Description of Unknown: Exemplary gene or splice site sequence"
caggugagag

SEQ ID NO: 1336 - RNA, 10 nt, Unknown
  source: /note="Description of Unknown: Exemplary gene or splice site sequence"
caggugagau

SEQ ID NO: 1337 - RNA, 10 nt, Unknown
  source: /note="Description of Unknown: Exemplary gene or splice site sequence"
caggugagca

SEQ ID NO: 1338 - RNA, 10 nt, Unknown
  source: /note="Description of Unknown: Exemplary gene or splice site sequence"
caggugagcc

SEQ ID NO: 1339 - RNA, 10 nt, Unknown
  source: /note="Description of Unknown: Exemplary gene or splice site sequence"
caggugagcg

SEQ ID NO: 1340 - RNA, 10 nt, Unknown
  source: /note="Description of Unknown: Exemplary gene or splice site sequence"
caggugagcu

SEQ ID NO: 1341 - RNA, 10 nt, Unknown
  source: /note="Description of Unknown: Exemplary gene or splice site sequence"
caggugagga

SEQ ID NO: 1342 - RNA, 10 nt, Unknown
  source: /note="Description of Unknown: Exemplary gene or splice site sequence"
caggugaggc

SEQ ID NO: 1343 - RNA, 10 nt, Unknown
  source: /note="Description of Unknown: Exemplary gene or splice site sequence"
caggugaggg

SEQ ID NO: 1344 - RNA, 10 nt, Unknown
  source: /note="Description of Unknown: Exemplary gene or splice site sequence"
caggugaggu

SEQ ID NO: 1345 - RNA, 10 nt, Unknown
  source: /note="Description of Unknown: Exemplary gene or splice site sequence"
caggugagua

SEQ ID NO: 1346 - RNA, 10 nt, Unknown
  source: /note="Description of Unknown: Exemplary gene or splice site sequence"
caggugaguc

SEQ ID NO: 1347 - RNA, 10 nt, Unknown
  source: /note="Description of Unknown: Exemplary gene or splice site sequence"
caggugagug

SEQ ID NO: 1348 - RNA, 10 nt, Unknown
  source: /note="Description of Unknown: Exemplary gene or splice site sequence"
caggugaguu

SEQ ID NO: 1349 - RNA, 10 nt, Unknown
  source: /note="Description of Unknown: Exemplary gene or splice site sequence"
caggugauaa

SEQ ID NO: 1350 - RNA, 10 nt, Unknown
  source: /note="Description of Unknown: Exemplary gene or splice site sequence"
caggugaucc

SEQ ID NO: 1351 - RNA, 10 nt, Unknown
  source: /note="Description of Unknown: Exemplary gene or splice site sequence"
caggugaucu

SEQ ID NO: 1352 - RNA, 10 nt, Unknown
  source: /note="Description of Unknown: Exemplary gene or splice site sequence"
caggugaugc

SEQ ID NO: 1353 - RNA, 10 nt, Unknown
  source: /note="Description of Unknown: Exemplary gene or splice site sequence"
caggugaugg

SEQ ID NO: 1354 - RNA, 10 nt, Unknown
  source: /note="Description of Unknown: Exemplary gene or splice site sequence"
caggugaugu

SEQ ID NO: 1355 - RNA, 10 nt, Unknown
  source: /note="Description of Unknown: Exemplary gene or splice site sequence"
caggugauua

SEQ ID NO: 1356 - RNA, 10 nt, Unknown
  source: /note="Description of Unknown: Exemplary gene or splice site sequence"
caggugauuc

SEQ ID NO: 1357 - RNA, 10 nt, Unknown
  source: /note="Description of Unknown: Exemplary gene or splice site sequence"
caggugauug

SEQ ID NO: 1358 - RNA, 10 nt, Unknown
  source: /note="Description of Unknown: Exemplary gene or splice site sequence"
caggugauuu

SEQ ID NO: 1359 - RNA, 10 nt, Unknown
  source: /note="Description of Unknown: Exemplary gene or splice site sequence"
caggugcaaa

SEQ ID NO: 1360 - RNA, 10 nt, Unknown
  source: /note="Description of Unknown: Exemplary gene or splice site sequence"
caggugcaag

SEQ ID NO: 1361 - RNA, 10 nt, Unknown
  source: /note="Description of Unknown: Exemplary gene or splice site sequence"
caggugcaca

SEQ ID NO: 1362 - RNA, 10 nt, Unknown
  source: /note="Description of Unknown: Exemplary gene or splice site sequence"
caggugcacg

SEQ ID NO: 1363 - RNA, 10 nt, Unknown
  source: /note="Description of Unknown: Exemplary gene or splice site sequence"
caggugcaga

SEQ ID NO: 1364 - RNA, 10 nt, Unknown
  source: /note="Description of Unknown: Exemplary gene or splice site sequence"
caggugcagg

SEQ ID NO: 1365 - RNA, 10 nt, Unknown
  source: /note="Description of Unknown: Exemplary gene or splice site sequence"
caggugcaua

SEQ ID NO: 1366 - RNA, 10 nt, Unknown
  source: /note="Description of Unknown: Exemplary gene or splice site sequence"
caggugcauc

SEQ ID NO: 1367 - RNA, 10 nt, Unknown
  source: /note="Description of Unknown: Exemplary gene or splice site sequence"
caggugcaug

SEQ ID NO: 1368 - RNA, 10 nt, Unknown
  source: /note="Description of Unknown: Exemplary gene or splice site sequence"
caggugccaa

SEQ ID NO: 1369 - RNA, 10 nt, Unknown
  source: /note="Description of Unknown: Exemplary gene or splice site sequence"
caggugccca

SEQ ID NO: 1370 - RNA, 10 nt, Unknown
  source: /note="Description of Unknown: Exemplary gene or splice site sequence"
caggugcccc

SEQ ID NO: 1371 - RNA, 10 nt, Unknown
  source: /note="Description of Unknown: Exemplary gene or splice site sequence"
caggugcccg

SEQ ID NO: 1372 - RNA, 10 nt, Unknown
  source: /note="Description of Unknown: Exemplary gene or splice site sequence"
caggugccua

SEQ ID NO: 1373 - RNA, 10 nt, Unknown
  source: /note="Description of Unknown: Exemplary gene or splice site sequence"
caggugccug

SEQ ID NO: 1374 - RNA, 10 nt, Unknown
  source: /note="Description of Unknown: Exemplary gene or splice site sequence"
caggugcgaa

SEQ ID NO: 1375 - RNA, 10 nt, Unknown
  source: /note="Description of Unknown: Exemplary gene or splice site sequence"
caggugcgca

SEQ ID NO: 1376 - RNA, 10 nt, Unknown
  source: /note="Description of Unknown: Exemplary gene or splice site sequence"
caggugcgcc

SEQ ID NO: 1377 - RNA, 10 nt, Unknown
  source: /note="Description of Unknown: Exemplary gene or splice site sequence"
caggugcgcg

SEQ ID NO: 1378 - RNA, 10 nt, Unknown
  source: /note="Description of Unknown: Exemplary gene or splice site sequence"
caggugcgga

SEQ ID NO: 1379 - RNA, 10 nt, Unknown
  source: /note="Description of Unknown: Exemplary gene or splice site sequence"
caggugcggu

SEQ ID NO: 1380 - RNA, 10 nt, Unknown
  source: /note="Description of Unknown: Exemplary gene or splice site sequence"
caggugcgua

SEQ ID NO: 1381 - RNA, 10 nt, Unknown
  source: /note="Description of Unknown: Exemplary gene or splice site sequence"
caggugcguc

SEQ ID NO: 1382 - RNA, 10 nt, Unknown
  source: /note="Description of Unknown: Exemplary gene or splice site sequence"
caggugcgug

SEQ ID NO: 1383 - RNA, 10 nt, Unknown
  source: /note="Description of Unknown: Exemplary gene or splice site sequence"
caggugcuag

SEQ ID NO: 1384 - RNA, 10 nt, Unknown
  source: /note="Description of Unknown: Exemplary gene or splice site sequence"
caggugcuau

SEQ ID NO: 1385 - RNA, 10 nt, Unknown
  source: /note="Description of Unknown: Exemplary gene or splice site sequence"
caggugcuca

SEQ ID NO: 1386 - RNA, 10 nt, Unknown
  source: /note="Description of Unknown: Exemplary gene or splice site sequence"
caggugcucc

SEQ ID NO: 1387 - RNA, 10 nt, Unknown
  source: /note="Description of Unknown: Exemplary gene or splice site sequence"
caggugcucg

SEQ ID NO: 1388 - RNA, 10 nt, Unknown
  source: /note="Description of Unknown: Exemplary gene or splice site sequence"
caggugcugc

SEQ ID NO: 1389 - RNA, 10 nt, Unknown
  source: /note="Description of Unknown: Exemplary gene or splice site sequence"
caggugcugg

SEQ ID NO: 1390 - RNA, 10 nt, Unknown
  source: /note="Description of Unknown: Exemplary gene or splice site sequence"
caggugcuua

SEQ ID NO: 1391 - RNA, 10 nt, Unknown
  source: /note="Description of Unknown: Exemplary gene or splice site sequence"
caggugcuuc

SEQ ID NO: 1392 - RNA, 10 nt, Unknown
  source: /note="Description of Unknown: Exemplary gene or splice site sequence"
caggugcuug

SEQ ID NO: 1393 - RNA, 10 nt, Unknown
  source: /note="Description of Unknown: Exemplary gene or splice site sequence"
cagguggaac

SEQ ID NO: 1394 - RNA, 10 nt, Unknown
  source: /note="Description of Unknown: Exemplary gene or splice site sequence"
cagguggaag

SEQ ID NO: 1395 - RNA, 10 nt, Unknown
  source: /note="Description of Unknown: Exemplary gene or splice site sequence"
cagguggaau

SEQ ID NO: 1396 - RNA, 10 nt, Unknown
  source: /note="Description of Unknown: Exemplary gene or splice site sequence"
cagguggaga

SEQ ID NO: 1397 - RNA, 10 nt, Unknown
  source: /note="Description of Unknown: Exemplary gene or splice site sequence"
cagguggagu

SEQ ID NO: 1398 - RNA, 10 nt, Unknown
  source: /note="Description of Unknown: Exemplary gene or splice site sequence"
cagguggauu

SEQ ID NO: 1399 - RNA, 10 nt, Unknown
  source: /note="Description of Unknown: Exemplary gene or splice site sequence"
cagguggcca

SEQ ID NO: 1400 - RNA, 10 nt, Unknown
  source: /note="Description of Unknown: Exemplary gene or splice site sequence"
cagguggcuc

SEQ ID NO: 1401 - RNA, 10 nt, Unknown
  source: /note="Description of Unknown: Exemplary gene or splice site sequence"
cagguggcug

SEQ ID NO: 1402 - RNA, 10 nt, Unknown
  source: /note="Description of Unknown: Exemplary gene or splice site sequence"
caggugggaa

SEQ ID NO: 1403 - RNA, 10 nt, Unknown
  source: /note="Description of Unknown: Exemplary gene or splice site sequence"
caggugggac

SEQ ID NO: 1404 - RNA, 10 nt, Unknown
  source: /note="Description of Unknown: Exemplary gene or splice site sequence"
caggugggag

SEQ ID NO: 1405 - RNA, 10 nt, Unknown
  source: /note="Description of Unknown: Exemplary gene or splice site sequence"
caggugggau

SEQ ID NO: 1406 - RNA, 10 nt, Unknown
  source: /note="Description of Unknown: Exemplary gene or splice site sequence"
caggugggca

SEQ ID NO: 1407 - RNA, 10 nt, Unknown
  source: /note="Description of Unknown: Exemplary gene or splice site sequence"
caggugggcc

SEQ ID NO: 1408 - RNA, 10 nt, Unknown
  source: /note="Description of Unknown: Exemplary gene or splice site sequence"
caggugggcu

SEQ ID NO: 1409 - RNA, 10 nt, Unknown
  source: /note="Description of Unknown: Exemplary gene or splice site sequence"
caggugggga

SEQ ID NO: 1410 - RNA, 10 nt, Unknown
  source: /note="Description of Unknown: Exemplary gene or splice site sequence"
cagguggggc

SEQ ID NO: 1411 - RNA, 10 nt, Unknown
  source: /note="Description of Unknown: Exemplary gene or splice site sequence"
cagguggggg

SEQ ID NO: 1412 - RNA, 10 nt, Unknown
  source: /note="Description of Unknown: Exemplary gene or splice site sequence"
cagguggggu

SEQ ID NO: 1413 - RNA, 10 nt, Unknown
  source: /note="Description of Unknown: Exemplary gene or splice site sequence"
caggugggua

SEQ ID NO: 1414 - RNA, 10 nt, Unknown
  source: /note="Description of Unknown: Exemplary gene or splice site sequence"
cagguggguc

SEQ ID NO: 1415 - RNA, 10 nt, Unknown
  source: /note="Description of Unknown: Exemplary gene or splice site sequence"
caggugggug

SEQ ID NO: 1416 - RNA, 10 nt, Unknown
  source: /note="Description of Unknown: Exemplary gene or splice site sequence"
cagguggguu

SEQ ID NO: 1417 - RNA, 10 nt, Unknown
  source: /note="Description of Unknown: Exemplary gene or splice site sequence"
cagguggucu

SEQ ID NO: 1418 - RNA, 10 nt, Unknown
  source: /note="Description of Unknown: Exemplary gene or splice site sequence"
cagguggugg

SEQ ID NO: 1419 - RNA, 10 nt, Unknown
  source: /note="Description of Unknown: Exemplary gene or splice site sequence"
caggugguug

SEQ ID NO: 1420 - RNA, 10 nt, Unknown
  source: /note="Description of Unknown: Exemplary gene or splice site sequence"
cagguguaca

SEQ ID NO: 1421 - RNA, 10 nt, Unknown
  source: /note="Description of Unknown: Exemplary gene or splice site sequence"
cagguguagg

SEQ ID NO: 1422 - RNA, 10 nt, Unknown
  source: /note="Description of Unknown: Exemplary gene or splice site sequence"
cagguguauc

SEQ ID NO: 1423 - RNA, 10 nt, Unknown
  source: /note="Description of Unknown: Exemplary gene or splice site sequence"
caggugucac

SEQ ID NO: 1424 - RNA, 10 nt, Unknown
  source: /note="Description of Unknown: Exemplary gene or splice site sequence"
caggugucag

SEQ ID NO: 1425 - RNA, 10 nt, Unknown
  source: /note="Description of Unknown: Exemplary gene or splice site sequence"
caggugucca

SEQ ID NO: 1426 - RNA, 10 nt, Unknown
  source: /note="Description of Unknown: Exemplary gene or splice site sequence"
cagguguccu

SEQ ID NO: 1427 - RNA, 10 nt, Unknown
  source: /note="Description of Unknown: Exemplary gene or splice site sequence"
caggugucua

SEQ ID NO: 1428 - RNA, 10 nt, Unknown
  source: /note="Description of Unknown: Exemplary gene or splice site sequence"
caggugucuc

SEQ ID NO: 1429 - RNA, 10 nt, Unknown
  source: /note="Description of Unknown: Exemplary gene or splice site sequence"
caggugucug

SEQ ID NO: 1430 - RNA, 10 nt, Unknown
  source: /note="Description of Unknown: Exemplary gene or splice site sequence"
caggugugaa

SEQ ID NO: 1431 - RNA, 10 nt, Unknown
  source: /note="Description of Unknown: Exemplary gene or splice site sequence"
caggugugac

SEQ ID NO: 1432 - RNA, 10 nt, Unknown
  source: /note="Description of Unknown: Exemplary gene or splice site sequence"
caggugugag

SEQ ID NO: 1433 - RNA, 10 nt, Unknown
  source: /note="Description of Unknown: Exemplary gene or splice site sequence"
caggugugau

SEQ ID NO: 1434 - RNA, 10 nt, Unknown
  source: /note="Description of Unknown: Exemplary gene or splice site sequence"
caggugugca

SEQ ID NO: 1435 - RNA, 10 nt, Unknown
  source: /note="Description of Unknown: Exemplary gene or splice site sequence"
caggugugcc

SEQ ID NO: 1436 - RNA, 10 nt, Unknown
  source: /note="Description of Unknown: Exemplary gene or splice site sequence"
caggugugcg

SEQ ID NO: 1437 - RNA, 10 nt, Unknown
  source: /note="Description of Unknown: Exemplary gene or splice site sequence"
caggugugcu

SEQ ID NO: 1438 - RNA, 10 nt, Unknown
  source: /note="Description of Unknown: Exemplary gene or splice site sequence"
caggugugga

SEQ ID NO: 1439 - RNA, 10 nt, Unknown
  source: /note="Description of Unknown: Exemplary gene or splice site sequence"
cagguguggc

SEQ ID NO: 1440 - RNA, 10 nt, Unknown
  source: /note="Description of Unknown: Exemplary gene or splice site sequence"
caggugugua

SEQ ID NO: 1441 - RNA, 10 nt, Unknown
  source: /note="Description of Unknown: Exemplary gene or splice site sequence"
cagguguguc

SEQ ID NO: 1442 - RNA, 10 nt, Unknown
  source: /note="Description of Unknown: Exemplary gene or splice site sequence"
caggugugug

SEQ ID NO: 1443 - RNA, 10 nt, Unknown
  source: /note="Description of Unknown: Exemplary gene or splice site sequence"
cagguguguu

SEQ ID NO: 1444 - RNA, 10 nt, Unknown
  source: /note="Description of Unknown: Exemplary gene or splice site sequence"
cagguguuua

SEQ ID NO: 1445 - RNA, 10 nt, Unknown
  source: /note="Description of Unknown: Exemplary gene or splice site sequence"
cagguuaaaa

SEQ ID NO: 1446 - RNA, 10 nt, Unknown
  source: /note="Description of Unknown: Exemplary gene or splice site sequence"
cagguuaaua

SEQ ID NO: 1447 - RNA, 10 nt, Unknown
  source: /note="Description of Unknown: Exemplary gene or splice site sequence"
cagguuaauc

SEQ ID NO: 1448 - RNA, 10 nt, Unknown
  source: /note="Description of Unknown: Exemplary gene or splice site sequence"
cagguuaccu

SEQ ID NO: 1449 - RNA, 10 nt, Unknown
  source: /note="Description of Unknown: Exemplary gene or splice site sequence"
cagguuagaa

SEQ ID NO: 1450 - RNA, 10 nt, Unknown
  source: /note="Description of Unknown: Exemplary gene or splice site sequence"
cagguuagag

SEQ ID NO: 1451 - RNA, 10 nt, Unknown
  source: /note="Description of Unknown: Exemplary gene or splice site sequence"
cagguuagau

SEQ ID NO: 1452 - RNA, 10 nt, Unknown
  source: /note="Description of Unknown: Exemplary gene or splice site sequence"
cagguuagcc

SEQ ID NO: 1453 - RNA, 10 nt, Unknown
  source: /note="Description of Unknown: Exemplary gene or splice site sequence"
cagguuaggg

SEQ ID NO: 1454 - RNA, 10 nt, Unknown
  source: /note="Description of Unknown: Exemplary gene or splice site sequence"
cagguuaggu

SEQ ID NO: 1455 - RNA, 10 nt, Unknown
  source: /note="Description of Unknown: Exemplary gene or splice site sequence"
cagguuagua

SEQ ID NO: 1456 - RNA, 10 nt, Unknown
  source: /note="Description of Unknown: Exemplary gene or splice site sequence"
cagguuaguc

SEQ ID NO: 1457 - RNA, 10 nt, Unknown
  source: /note="Description of Unknown: Exemplary gene or splice site sequence"
cagguuagug

SEQ ID NO: 1458 - RNA, 10 nt, Unknown
  source: /note="Description of Unknown: Exemplary gene or splice site sequence"
cagguuaguu

SEQ ID NO: 1459 - RNA, 10 nt, Unknown
  source: /note="Description of Unknown: Exemplary gene or splice site sequence"
cagguuauca

SEQ ID NO: 1460 - RNA, 10 nt, Unknown
  source: /note="Description of Unknown: Exemplary gene or splice site sequence"
cagguuaugu

SEQ ID NO: 1461 - RNA, 10 nt, Unknown
  source: /note="Description of Unknown: Exemplary gene or splice site sequence"
cagguuauua

SEQ ID NO: 1462 - RNA, 10 nt, Unknown
  source: /note="Description of Unknown: Exemplary gene or splice site sequence"
cagguuauug

SEQ ID NO: 1463 - RNA, 10 nt, Unknown
  source: /note="Description of Unknown: Exemplary gene or splice site sequence"
cagguucaaa

SEQ ID NO: 1464 - RNA, 10 nt, Unknown
  source: /note="Description of Unknown: Exemplary gene or splice site sequence"
cagguucaac

SEQ ID NO: 1465 - RNA, 10 nt, Unknown
  source: /note="Description of Unknown: Exemplary gene or splice site sequence"
cagguucaag

SEQ ID NO: 1466 - RNA, 10 nt, Unknown
  source: /note="Description of Unknown: Exemplary gene or splice site sequence"
cagguucaca

SEQ ID NO: 1467 - RNA, 10 nt, Unknown
  source: /note="Description of Unknown: Exemplary gene or splice site sequence"
cagguucacg

SEQ ID NO: 1468 - RNA, 10 nt, Unknown
  source: /note="Description of Unknown: Exemplary gene or splice site sequence"
cagguucagg

SEQ ID NO: 1469 - RNA, 10 nt, Unknown
  source: /note="Description of Unknown: Exemplary gene or splice site sequence"
cagguucaug

SEQ ID NO: 1470 - RNA, 10 nt, Unknown
  source: /note="Description of Unknown: Exemplary gene or splice site sequence"
cagguuccag

SEQ ID NO: 1471 - RNA, 10 nt, Unknown
  source: /note="Description of Unknown: Exemplary gene or splice site sequence"
cagguuccca

SEQ ID NO: 1472 - RNA, 10 nt, Unknown
  source: /note="Description of Unknown: Exemplary gene or splice site sequence"
cagguucccg

SEQ ID NO: 1473 - RNA, 10 nt, Unknown
  source: /note="Description of Unknown: Exemplary gene or splice site sequence"
cagguucgaa

SEQ ID NO: 1474 - RNA, 10 nt, Unknown
  source: /note="Description of Unknown: Exemplary gene or splice site sequence"
cagguucgag

SEQ ID NO: 1475 - RNA, 10 nt, Unknown
  source: /note="Description of Unknown: Exemplary gene or splice site sequence"
cagguucuau

SEQ ID NO: 1476 - RNA, 10 nt, Unknown
  source: /note="Description of Unknown: Exemplary gene or splice site sequence"
cagguucugc

SEQ ID NO: 1477 - RNA, 10 nt, Unknown
  source: /note="Description of Unknown: Exemplary gene or splice site sequence"
cagguucuua

SEQ ID NO: 1478 - RNA, 10 nt, Unknown
  source: /note="Description of Unknown: Exemplary gene or splice site sequence"
cagguucuuc

SEQ ID NO: 1479 - RNA, 10 nt, Unknown
  source: /note="Description of Unknown: Exemplary gene or splice site sequence"
cagguucuuu

SEQ ID NO: 1480 - RNA, 10 nt, Unknown
  source: /note="Description of Unknown: Exemplary gene or splice site sequence"
cagguugaac

SEQ ID NO: 1481 - RNA, 10 nt, Unknown
  source: /note="Description of Unknown: Exemplary gene or splice site sequence"
cagguugaag

SEQ ID NO: 1482 - RNA, 10 nt, Unknown
  source: /note="Description of Unknown: Exemplary gene or splice site sequence"
cagguugagu

SEQ ID NO: 1483 - RNA, 10 nt, Unknown
  source: /note="Description of Unknown: Exemplary gene or splice site sequence"
cagguugaua

SEQ ID NO: 1484 - RNA, 10 nt, Unknown
  source: /note="Description of Unknown: Exemplary gene or splice site sequence"
cagguuggag

SEQ ID NO: 1485 - RNA, 10 nt, Unknown
  source: /note="Description of Unknown: Exemplary gene or splice site sequence"
cagguuggca

SEQ ID NO: 1486 - RNA, 10 nt, Unknown
  source: /note="Description of Unknown: Exemplary gene or splice site sequence"
cagguuggcc

SEQ ID NO: 1487 - RNA, 10 nt, Unknown
  source: /note="Description of Unknown: Exemplary gene or splice site sequence"
cagguugguc

SEQ ID NO: 1488 - RNA, 10 nt, Unknown
  source: /note="Description of Unknown: Exemplary gene or splice site sequence"
cagguuggug

SEQ ID NO: 1489 - RNA, 10 nt, Unknown
  source: /note="Description of Unknown: Exemplary gene or splice site sequence"
cagguugguu

SEQ ID NO: 1490 - RNA, 10 nt, Unknown
  source: /note="Description of Unknown: Exemplary gene or splice site sequence"
cagguuguaa

SEQ ID NO: 1491 - RNA, 10 nt, Unknown
  source: /note="Description of Unknown: Exemplary gene or splice site sequence"
cagguuguac

SEQ ID NO: 1492 - RNA, 10 nt, Unknown
  source: /note="Description of Unknown: Exemplary gene or splice site sequence"
cagguuguau

SEQ ID NO: 1493 - RNA, 10 nt, Unknown
  source: /note="Description of Unknown: Exemplary gene or splice site sequence"
cagguuguca

SEQ ID NO: 1494 - RNA, 10 nt, Unknown
  source: /note="Description of Unknown: Exemplary gene or splice site sequence"
cagguuguga

SEQ ID NO: 1495 - RNA, 10 nt, Unknown
  source: /note="Description of Unknown: Exemplary gene or splice site sequence"
cagguuguug

SEQ ID NO: 1496 - RNA, 10 nt, Unknown
  source: /note="Description of Unknown: Exemplary gene or splice site sequence"
cagguuuaag

SEQ ID NO: 1497 - RNA, 10 nt, Unknown
  source: /note="Description of Unknown: Exemplary gene or splice site sequence"
cagguuuacc

SEQ ID NO: 1498 - RNA, 10 nt, Unknown
  source: /note="Description of Unknown: Exemplary gene or splice site sequence"
cagguuuagc

SEQ ID NO: 1499 - RNA, 10 nt, Unknown
  source: /note="Description of Unknown: Exemplary gene or splice site sequence"
cagguuuagu

SEQ ID NO: 1500 - RNA, 10 nt, Unknown
  source: /note="Description of Unknown: Exemplary gene or splice site sequence"
cagguuucuu

SEQ ID NO: 1501 - RNA, 10 nt, Unknown
  source: /note="Description of Unknown: Exemplary gene or splice site sequence"
cagguuugaa

SEQ ID NO: 1502 - RNA, 10 nt, Unknown
  source: /note="Description of Unknown: Exemplary gene or splice site sequence"
cagguuugag

SEQ ID NO: 1503 - RNA, 10 nt, Unknown
  source: /note="Description of Unknown: Exemplary gene or splice site sequence"
cagguuugau

SEQ ID NO: 1504 - RNA, 10 nt, Unknown
  source: /note="Description of Unknown: Exemplary gene or splice site sequence"
cagguuugcc

SEQ ID NO: 1505 - RNA, 10 nt, Unknown
  source: /note="Description of Unknown: Exemplary gene or splice site sequence"
cagguuugcu

SEQ ID NO: 1506 - RNA, 10 nt, Unknown
  source: /note="Description of Unknown: Exemplary gene or splice site sequence"
cagguuuggg

SEQ ID NO: 1507 - RNA, 10 nt, Unknown
  source: /note="Description of Unknown: Exemplary gene or splice site sequence"
cagguuuggu

SEQ ID NO: 1508 - RNA, 10 nt, Unknown
  source: /note="Description of Unknown: Exemplary gene or splice site sequence"
cagguuugua

SEQ ID NO: 1509 - RNA, 10 nt, Unknown
  source: /note="Description of Unknown: Exemplary gene or splice site sequence"
cagguuugug

SEQ ID NO: 1510 - RNA, 10 nt, Unknown
  source: /note="Description of Unknown: Exemplary gene or splice site sequence"
cagguuuguu

SEQ ID NO: 1511 - RNA, 10 nt, Unknown
  source: /note="Description of Unknown: Exemplary gene or splice site sequence"
cagguuuucu

SEQ ID NO: 1512 - RNA, 10 nt, Unknown
  source: /note="Description of Unknown: Exemplary gene or splice site sequence"
cagguuuugg

SEQ ID NO: 1513 - RNA, 10 nt, Unknown
  source: /note="Description of Unknown: Exemplary gene or splice site sequence"
cagguuuuuc

SEQ ID NO: 1514 - RNA, 10 nt, Unknown
  source: /note="Description of Unknown: Exemplary gene or splice site sequence"
cagguuuuuu

SEQ ID NO: 1515 - RNA, 10 nt, Unknown
  source: /note="Description of Unknown: Exemplary gene or splice site sequence"
caugcagguu

SEQ ID NO: 1516 - RNA, 10 nt, Unknown
  source: /note="Description of Unknown: Exemplary gene or splice site sequence"
cauguaaaac

SEQ ID NO: 1517 - RNA, 10 nt, Unknown
  source: /note="Description of Unknown: Exemplary gene or splice site sequence"
cauguaacua

SEQ ID NO: 1518 - RNA, 10 nt, Unknown
  source: /note="Description of Unknown: Exemplary gene or splice site sequence"
cauguaagaa

SEQ ID NO: 1519 - RNA, 10 nt, Unknown
  source: /note="Description of Unknown: Exemplary gene or splice site sequence"
cauguaagag

SEQ ID NO: 1520 - RNA, 10 nt, Unknown
  source: /note="Description of Unknown: Exemplary gene or splice site sequence"
cauguaagau

SEQ ID NO: 1521 - RNA, 10 nt, Unknown
  source: /note="Description of Unknown: Exemplary gene or splice site sequence"
cauguaagcc

SEQ ID NO: 1522 - RNA, 10 nt, Unknown
  source: /note="Description of Unknown: Exemplary gene or splice site sequence"
cauguaagua

SEQ ID NO: 1523 - RNA, 10 nt, Unknown
  source: /note="Description of Unknown: Exemplary gene or splice site sequence"
cauguaagug

SEQ ID NO: 1524 - RNA, 10 nt, Unknown
  source: /note="Description of Unknown: Exemplary gene or splice site sequence"
cauguaaguu

SEQ ID NO: 1525 - RNA, 10 nt, Unknown
  source: /note="Description of Unknown: Exemplary gene or splice site sequence"
cauguaauua

SEQ ID NO: 1526 - RNA, 10 nt, Unknown
  source: /note="Description of Unknown: Exemplary gene or splice site sequence"
cauguacaua

SEQ ID NO: 1527 - RNA, 10 nt, Unknown
  source: /note="Description of Unknown: Exemplary gene or splice site sequence"
cauguaccac

SEQ ID NO: 1528 - RNA, 10 nt, Unknown
  source: /note="Description of Unknown: Exemplary gene or splice site sequence"
cauguacguu

SEQ ID NO: 1529 - RNA, 10 nt, Unknown
  source: /note="Description of Unknown: Exemplary gene or splice site sequence"
cauguaggua

SEQ ID NO: 1530 - RNA, 10 nt, Unknown
  source: /note="Description of Unknown: Exemplary gene or splice site sequence"
cauguaggug

SEQ ID NO: 1531 - RNA, 10 nt, Unknown
  source: /note="Description of Unknown: Exemplary gene or splice site sequence"
cauguagguu

SEQ ID NO: 1532 - RNA, 10 nt, Unknown
  source: /note="Description of Unknown: Exemplary gene or splice site sequence"
cauguaugaa

SEQ ID NO: 1533 - RNA, 10 nt, Unknown
  source: /note="Description of Unknown: Exemplary gene or splice site sequence"
cauguaugua

SEQ ID NO: 1534 - RNA, 10 nt, Unknown
  source: /note="Description of Unknown: Exemplary gene or splice site sequence"
cauguaugug

SEQ ID NO: 1535 - RNA, 10 nt, Unknown
  source: /note="Description of Unknown: Exemplary gene or splice site sequence"
cauguauguu

SEQ ID NO: 1536 - RNA, 10 nt, Unknown
  source: /note="Description of Unknown: Exemplary gene or splice site sequence"
caugugagaa

SEQ ID NO: 1537 - RNA, 10 nt, Unknown
  source: /note="Description of Unknown: Exemplary gene or splice site sequence"
caugugagca

SEQ ID NO: 1538 - RNA, 10 nt, Unknown
  source: /note="Description of Unknown: Exemplary gene or splice site sequence"
caugugagcu

SEQ ID NO: 1539 - RNA, 10 nt, Unknown
  source: /note="Description of Unknown: Exemplary gene or splice site sequence"
caugugagua

SEQ ID NO: 1540 - RNA, 10 nt, Unknown
  source: /note="Description of Unknown: Exemplary gene or splice site sequence"
caugugaguc

SEQ ID NO: 1541 - RNA, 10 nt, Unknown
  source: /note="Description of Unknown: Exemplary gene or splice site sequence"
caugugagug

SEQ ID NO: 1542 - RNA, 10 nt, Unknown
  source: /note="Description of Unknown: Exemplary gene or splice site sequence"
caugugaguu

SEQ ID NO: 1543 - RNA, 10 nt, Unknown
  source: /note="Description of Unknown: Exemplary gene or splice site sequence"
caugugcgua

SEQ ID NO: 1544 - RNA, 10 nt, Unknown
  source: /note="Description of Unknown: Exemplary gene or splice site sequence"
caugugggaa

SEQ ID NO: 1545 - RNA, 10 nt, Unknown
  source: /note="Description of Unknown: Exemplary gene or splice site sequence"
cauguggguu

SEQ ID NO: 1546 - RNA, 10 nt, Unknown
  source: /note="Description of Unknown: Exemplary gene or splice site sequence"
caugugugug

SEQ ID NO: 1547 - RNA, 10 nt, Unknown
  source: /note="Description of Unknown: Exemplary gene or splice site sequence"
cauguguguu

SEQ ID NO: 1548 - RNA, 10 nt, Unknown
  source: /note="Description of Unknown: Exemplary gene or splice site sequence"
cauguuaaua

SEQ ID NO: 1549 - RNA, 10 nt, Unknown
  source: /note="Description of Unknown: Exemplary gene or splice site sequence"
cauguuagcc

SEQ ID NO: 1550 - RNA, 10 nt, Unknown
  source: /note="Description of Unknown: Exemplary gene or splice site sequence"
ccaguaagau

SEQ ID NO: 1551 - RNA, 10 nt, Unknown
  source: /note="Description of Unknown: Exemplary gene or splice site sequence"
ccaguaagca

SEQ ID NO: 1552 - RNA, 10 nt, Unknown
  source: /note="Description of Unknown: Exemplary gene or splice site sequence"
ccaguaagcc

SEQ ID NO: 1553 - RNA, 10 nt, Unknown
  source: /note="Description of Unknown: Exemplary gene or splice site sequence"
ccaguaagcu

SEQ ID NO: 1554 - RNA, 10 nt, Unknown
  source: /note="Description of Unknown: Exemplary gene or splice site sequence"
ccaguaagga

SEQ ID NO: 1555 - RNA, 10 nt, Unknown
  source: /note="Description of Unknown: Exemplary gene or splice site sequence"
ccaguaagua

SEQ ID NO: 1556 - RNA, 10 nt, Unknown
  source: /note="Description of Unknown: Exemplary gene or splice site sequence"
ccaguaaguc

SEQ ID NO: 1557 - RNA, 10 nt, Unknown
  source: /note="Description of Unknown: Exemplary gene or splice site sequence"
ccaguaagug

SEQ ID NO: 1558 - RNA, 10 nt, Unknown
  source: /note="Description of Unknown: Exemplary gene or splice site sequence"
ccaguaaguu

SEQ ID NO: 1559 - RNA, 10 nt, Unknown
  source: /note="Description of Unknown: Exemplary gene or splice site sequence"
ccaguaauug

SEQ ID NO: 1560 - RNA, 10 nt, Unknown
  source: /note="Description of Unknown: Exemplary gene or splice site sequence"
ccaguacggg

SEQ ID NO: 1561 - RNA, 10 nt, Unknown
  source: /note="Description of Unknown: Exemplary gene or splice site sequence"
ccaguagguc

SEQ ID NO: 1562 - RNA, 10 nt, Unknown
  source: /note="Description of Unknown: Exemplary gene or splice site sequence"
ccaguauugu

SEQ ID NO: 1563 - RNA, 10 nt, Unknown
  source: /note="Description of Unknown: Exemplary gene or splice site sequence"
ccagugaggc

SEQ ID NO: 1564 - RNA, 10 nt, Unknown
  source: /note="Description of Unknown: Exemplary gene or splice site sequence"
ccagugagua

SEQ ID NO: 1565 - RNA, 10 nt, Unknown
  source: /note="Description of Unknown: Exemplary gene or splice site sequence"
ccagugagug

SEQ ID NO: 1566 - RNA, 10 nt, Unknown
  source: /note="Description of Unknown: Exemplary gene or splice site sequence"
ccaguggguc

SEQ ID NO: 1567 - RNA, 10 nt, Unknown
  source: /note="Description of Unknown: Exemplary gene or splice site sequence"
ccaguuaguu

SEQ ID NO: 1568 - RNA, 10 nt, Unknown
  source: /note="Description of Unknown: Exemplary gene or splice site sequence"
ccaguugagu

SEQ ID NO: 1569 - RNA, 10 nt, Unknown
  source: /note="Description of Unknown: Exemplary gene or splice site sequence"
cccguaagau

SEQ ID NO: 1570 - RNA, 10 nt, Unknown
  source: /note="Description of Unknown: Exemplary gene or splice site sequence"
cccguauguc

SEQ ID NO: 1571 - RNA, 10 nt, Unknown
  source: /note="Description of Unknown: Exemplary gene or splice site sequence"
cccguauguu

SEQ ID NO: 1572 - RNA, 10 nt, Unknown
  source: /note="Description of Unknown: Exemplary gene or splice site sequence"
cccguccugc

SEQ ID NO: 1573 - RNA, 10 nt, Unknown
  source: /note="Description of Unknown: Exemplary gene or splice site sequence"
cccgugagug

SEQ ID NO: 1574 - RNA, 10 nt, Unknown
  source: /note="Description of Unknown: Exemplary gene or splice site sequence"
ccgguaaaga

SEQ ID NO: 1575 - RNA, 10 nt, Unknown
  source: /note="Description of Unknown: Exemplary gene or splice site sequence"
ccgguaagau

SEQ ID NO: 1576 - RNA, 10 nt, Unknown
  source: /note="Description of Unknown: Exemplary gene or splice site sequence"
ccgguaagcc

SEQ ID NO: 1577 - RNA, 10 nt, Unknown
  source: /note="Description of Unknown: Exemplary gene or splice site sequence"
ccgguaagga

SEQ ID NO: 1578 - RNA, 10 nt, Unknown
  source: /note="Description of Unknown: Exemplary gene or splice site sequence"
ccgguaaggc

SEQ ID NO: 1579 - RNA, 10 nt, Unknown
  source: /note="Description of Unknown: Exemplary gene or splice site sequence"
ccgguaaugg

SEQ ID NO: 1580 - RNA, 10 nt, Unknown
  source: /note="Description of Unknown: Exemplary gene or splice site sequence"
ccgguacagu

SEQ ID NO: 1581 - RNA, 10 nt, Unknown
  source: /note="Description of Unknown: Exemplary gene or splice site sequence"
ccgguacuga

SEQ ID NO: 1582 - RNA, 10 nt, Unknown
  source: /note="Description of Unknown: Exemplary gene or splice site sequence"
ccgguauucc

SEQ ID NO: 1583 - RNA, 10 nt, Unknown
  source: /note="Description of Unknown: Exemplary gene or splice site sequence"
ccggucagug

SEQ ID NO: 1584 - RNA, 10 nt, Unknown
  source: /note="Description of Unknown: Exemplary gene or splice site sequence"
ccggugaaaa

SEQ ID NO: 1585 - RNA, 10 nt, Unknown
  source: /note="Description of Unknown: Exemplary gene or splice site sequence"
ccggugagaa

SEQ ID NO: 1586 - RNA, 10 nt, Unknown
  source: /note="Description of Unknown: Exemplary gene or splice site sequence"
ccggugaggg

SEQ ID NO: 1587 - RNA, 10 nt, Unknown
  source: /note="Description of Unknown: Exemplary gene or splice site sequence"
ccggugagug

SEQ ID NO: 1588 - RNA, 10 nt, Unknown
  source: /note="Description of Unknown: Exemplary gene or splice site sequence"
ccggugaguu

SEQ ID NO: 1589 - RNA, 10 nt, Unknown
  source: /note="Description of Unknown: Exemplary gene or splice site sequence"
ccggugcgcg

SEQ ID NO: 1590 - RNA, 10 nt, Unknown
  source: /note="Description of Unknown: Exemplary gene or splice site sequence"
ccggugggcg

SEQ ID NO: 1591 - RNA, 10 nt, Unknown
  source: /note="Description of Unknown: Exemplary gene or splice site sequence"
ccgguugguc

SEQ ID NO: 1592 - RNA, 10 nt, Unknown
  source: /note="Description of Unknown: Exemplary gene or splice site sequence"
ccuguaaaug

SEQ ID NO: 1593 - RNA, 10 nt, Unknown
  source: /note="Description of Unknown: Exemplary gene or splice site sequence"
ccuguaaauu

SEQ ID NO: 1594 - RNA, 10 nt, Unknown
  source: /note="Description of Unknown: Exemplary gene or splice site sequence"
ccuguaagaa

SEQ ID NO: 1595 - RNA, 10 nt, Unknown
  source: /note="Description of Unknown: Exemplary gene or splice site sequence"
ccuguaagac

SEQ ID NO: 1596 - RNA, 10 nt, Unknown
  source: /note="Description of Unknown: Exemplary gene or splice site sequence"
ccuguaagag

SEQ ID NO: 1597 - RNA, 10 nt, Unknown
  source: /note="Description of Unknown: Exemplary gene or splice site sequence"
ccuguaagca

SEQ ID NO: 1598 - RNA, 10 nt, Unknown
  source: /note="Description of Unknown: Exemplary gene or splice site sequence"
ccuguaagcg

SEQ ID NO: 1599 - RNA, 10 nt, Unknown
  source: /note="Description of Unknown: Exemplary gene or splice site sequence"
ccuguaagga

SEQ ID NO: 1600 - RNA, 10 nt, Unknown
  source: /note="Description of Unknown: Exemplary gene or splice site sequence"
ccuguaaguu

SEQ ID NO: 1601 - RNA, 10 nt, Unknown
  source: /note="Description of Unknown: Exemplary gene or splice site sequence"
ccuguaggua

SEQ ID NO: 1602 - RNA, 10 nt, Unknown
  source: /note="Description of Unknown: Exemplary gene or splice site sequence"
ccuguaggug

SEQ ID NO: 1603 - RNA, 10 nt, Unknown
  source: /note="Description of Unknown: Exemplary gene or splice site sequence"
ccuguaucuu

SEQ ID NO: 1604 - RNA, 10 nt, Unknown
  source: /note="Description of Unknown: Exemplary gene or splice site sequence"
ccuguauggu

SEQ ID NO: 1605 - RNA, 10 nt, Unknown
  source: /note="Description of Unknown: Exemplary gene or splice site sequence"
ccuguaugug

SEQ ID NO: 1606 - RNA, 10 nt, Unknown
  source: /note="Description of Unknown: Exemplary gene or splice site sequence"
ccugugagaa

SEQ ID NO: 1607 - RNA, 10 nt, Unknown
  source: /note="Description of Unknown: Exemplary gene or splice site sequence"
ccugugagca

SEQ ID NO: 1608 - RNA, 10 nt, Unknown
  source: /note="Description of Unknown: Exemplary gene or splice site sequence"
ccugugaggg

SEQ ID NO: 1609 - RNA, 10 nt, Unknown
  source: /note="Description of Unknown: Exemplary gene or splice site sequence"
ccugugaguc

SEQ ID NO: 1610 - RNA, 10 nt, Unknown
  source: /note="Description of Unknown: Exemplary gene or splice site sequence"
ccugugagug

SEQ ID NO: 1611 - RNA, 10 nt, Unknown
  source: /note="Description of Unknown: Exemplary gene or splice site sequence"
ccugugaguu

SEQ ID NO: 1612 - RNA, 10 nt, Unknown
  source: /note="Description of Unknown: Exemplary gene or splice site sequence"
ccuguggcuc

SEQ ID NO: 1613 - RNA, 10 nt, Unknown
  source: /note="Description of Unknown: Exemplary gene or splice site sequence"
ccugugggua

SEQ ID NO: 1614 - RNA, 10 nt, Unknown
  source: /note="Description of Unknown: Exemplary gene or splice site sequence"
ccugugugua

SEQ ID NO: 1615 - RNA, 10 nt, Unknown
  source: /note="Description of Unknown: Exemplary gene or splice site sequence"
ccuguuagaa

SEQ ID NO: 1616 - RNA, 10 nt, Unknown
  source: /note="Description of Unknown: Exemplary gene or splice site sequence"
cgaguaaggg

SEQ ID NO: 1617 - RNA, 10 nt, Unknown
  source: /note="Description of Unknown: Exemplary gene or splice site sequence"
cgaguaaggu

SEQ ID NO: 1618 - RNA, 10 nt, Unknown
  source: /note="Description of Unknown: Exemplary gene or splice site sequence"
cgaguagcug

SEQ ID NO: 1619 - RNA, 10 nt, Unknown
  source: /note="Description of Unknown: Exemplary gene or splice site sequence"
cgaguaggug

SEQ ID NO: 1620 - RNA, 10 nt, Unknown
  source: /note="Description of Unknown: Exemplary gene or splice site sequence"
cgaguagguu

SEQ ID NO: 1621 - RNA, 10 nt, Unknown
  source: /note="Description of Unknown: Exemplary gene or splice site sequence"
cgagugagca

SEQ ID NO: 1622 - RNA, 10 nt, Unknown
  source: /note="Description of Unknown: Exemplary gene or splice site sequence"
cgcguaagag

SEQ ID NO: 1623 - RNA, 10 nt, Unknown
  source: /note="Description of Unknown: Exemplary gene or splice site sequence"
cgggcaggca

SEQ ID NO: 1624 - RNA, 10 nt, Unknown
  source: /note="Description of Unknown: Exemplary gene or splice site sequence"
cggguaagcc

SEQ ID NO: 1625 - RNA, 10 nt, Unknown
  source: /note="Description of Unknown: Exemplary gene or splice site sequence"
cggguaagcu

SEQ ID NO: 1626 - RNA, 10 nt, Unknown
  source: /note="Description of Unknown: Exemplary gene or splice site sequence"
cggguaaguu

SEQ ID NO: 1627 - RNA, 10 nt, Unknown
  source: /note="Description of Unknown: Exemplary gene or splice site sequence"
cggguaauuc

SEQ ID NO: 1628 - RNA, 10 nt, Unknown
  source: /note="Description of Unknown: Exemplary gene or splice site sequence"
cggguaauuu

SEQ ID NO: 1629 - RNA, 10 nt, Unknown
  source: /note="Description of Unknown: Exemplary gene or splice site sequence"
cggguacagu

SEQ ID NO: 1630 - RNA, 10 nt, Unknown
  source: /note="Description of Unknown: Exemplary gene or splice site sequence"
cggguacggg

SEQ ID NO: 1631 - RNA, 10 nt, Unknown
  source: /note="Description of Unknown: Exemplary gene or splice site sequence"
cggguaggag

SEQ ID NO: 1632 - RNA, 10 nt, Unknown
  source: /note="Description of Unknown: Exemplary gene or splice site sequence"
cggguaggcc

SEQ ID NO: 1633 - RNA, 10 nt, Unknown
  source: /note="Description of Unknown: Exemplary gene or splice site sequence"
cggguaggug

SEQ ID NO: 1634 - RNA, 10 nt, Unknown
  source: /note="Description of Unknown: Exemplary gene or splice site sequence"
cggguauuua

SEQ ID NO: 1635 - RNA, 10 nt, Unknown
  source: /note="Description of Unknown: Exemplary gene or splice site sequence"
cgggucugag

SEQ ID NO: 1636 - RNA, 10 nt, Unknown
  source: /note="Description of Unknown: Exemplary gene or splice site sequence"
cgggugaccg

SEQ ID NO: 1637 - RNA, 10 nt, Unknown
  source: /note="Description of Unknown: Exemplary gene or splice site sequence"
cgggugacuc

SEQ ID NO: 1638 - RNA, 10 nt, Unknown
  source: /note="Description of Unknown: Exemplary gene or splice site sequence"
cgggugagaa

SEQ ID NO: 1639 - RNA, 10 nt, Unknown
  source: /note="Description of Unknown: Exemplary gene or splice site sequence"
cgggugaggg

SEQ ID NO: 1640 - RNA, 10 nt, Unknown
  source: /note="Description of Unknown: Exemplary gene or splice site sequence"
cgggugaggu

SEQ ID NO: 1641 - RNA, 10 nt, Unknown
  source: /note="Description of Unknown: Exemplary gene or splice site sequence"
cgggugagua

SEQ ID NO: 1642 - RNA, 10 nt, Unknown
  source: /note="Description of Unknown: Exemplary gene or splice site sequence"
cgggugagug

SEQ ID NO: 1643 - RNA, 10 nt, Unknown
  source: /note="Description of Unknown: Exemplary gene or splice site sequence"
cgggugaguu

SEQ ID NO: 1644 - RNA, 10 nt, Unknown
  source: /note="Description of Unknown: Exemplary gene or splice site sequence"
cgggugauuu

SEQ ID NO: 1645 - RNA, 10 nt, Unknown
  source: /note="Description of Unknown: Exemplary gene or splice site sequence"
cgggugccuu

SEQ ID NO: 1646 - RNA, 10 nt, Unknown
  source: /note="Description of Unknown: Exemplary gene or splice site sequence"
cgggugggag

SEQ ID NO: 1647 - RNA, 10 nt, Unknown
  source: /note="Description of Unknown: Exemplary gene or splice site sequence"
cgggugggug

SEQ ID NO: 1648 - RNA, 10 nt, Unknown
  source: /note="Description of Unknown: Exemplary gene or splice site sequence"
cggguggguu

SEQ ID NO: 1649 - RNA, 10 nt, Unknown
  source: /note="Description of Unknown: Exemplary gene or splice site sequence"
cggguguguc

SEQ ID NO: 1650 - RNA, 10 nt, Unknown
  source: /note="Description of Unknown: Exemplary gene or splice site sequence"
cgggugugug

SEQ ID NO: 1651 - RNA, 10 nt, Unknown
  source: /note="Description of Unknown: Exemplary gene or splice site sequence"
cggguguguu

SEQ ID NO: 1652 - RNA, 10 nt, Unknown
  source: /note="Description of Unknown: Exemplary gene or splice site sequence"
cggguucaag

SEQ ID NO: 1653 - RNA, 10 nt, Unknown
  source: /note="Description of Unknown: Exemplary gene or splice site sequence"
cggguucaug

SEQ ID NO: 1654 - RNA, 10 nt, Unknown
  source: /note="Description of Unknown: Exemplary gene or splice site sequence"
cggguuugcu

SEQ ID NO: 1655 - RNA, 10 nt, Unknown
  source: /note="Description of Unknown: Exemplary gene or splice site sequence"
cguguagggu

SEQ ID NO: 1656 - RNA, 10 nt, Unknown
  source: /note="Description of Unknown: Exemplary gene or splice site sequence"
cguguaugca

SEQ ID NO: 1657 - RNA, 10 nt, Unknown
  source: /note="Description of Unknown: Exemplary gene or splice site sequence"
cguguaugua

SEQ ID NO: 1658 - RNA, 10 nt, Unknown
  source: /note="Description of Unknown: Exemplary gene or splice site sequence"
cgugucugua

SEQ ID NO: 1659 - RNA, 10 nt, Unknown
  source: /note="Description of Unknown: Exemplary gene or splice site sequence"
cgugugagug

SEQ ID NO: 1660 - RNA, 10 nt, Unknown
  source: /note="Description of Unknown: Exemplary gene or splice site sequence"
cguguuuucu

SEQ ID NO: 1661 - RNA, 10 nt, Unknown
  source: /note="Description of Unknown: Exemplary gene or splice site sequence"
cuaguaaaug

SEQ ID NO: 1662 - RNA, 10 nt, Unknown
  source: /note="Description of Unknown: Exemplary gene or splice site sequence"
cuaguaagcg

SEQ ID NO: 1663 - RNA, 10 nt, Unknown
  source: /note="Description of Unknown: Exemplary gene or splice site sequence"
cuaguaagcu

SEQ ID NO: 1664 - RNA, 10 nt, Unknown
  source: /note="Description of Unknown: Exemplary gene or splice site sequence"
cuaguaagua

SEQ ID NO: 1665 - RNA, 10 nt, Unknown
  source: /note="Description of Unknown: Exemplary gene or splice site sequence"
cuaguaaguc

SEQ ID NO: 1666 - RNA, 10 nt, Unknown
  source: /note="Description of Unknown: Exemplary gene or splice site sequence"
cuaguaagug

SEQ ID NO: 1667 - RNA, 10 nt, Unknown
  source: /note="Description of Unknown: Exemplary gene or splice site sequence"
cuaguaaguu

SEQ ID NO: 1668 - RNA, 10 nt, Unknown
  source: /note="Description of Unknown: Exemplary gene or splice site sequence"
cuaguaauuu

SEQ ID NO: 1669 - RNA, 10 nt, Unknown
  source: /note="Description of Unknown: Exemplary gene or splice site sequence"
cuaguaggua

SEQ ID NO: 1670 - RNA, 10 nt, Unknown
  source: /note="Description of Unknown: Exemplary gene or splice site sequence"
cuaguagguu

SEQ ID NO: 1671 - RNA, 10 nt, Unknown
  source: /note="Description of Unknown: Exemplary gene or splice site sequence"
cuaguaugua

SEQ ID NO: 1672 - RNA, 10 nt, Unknown
  source: /note="Description of Unknown: Exemplary gene or splice site sequence"
cuaguauguu

SEQ ID NO: 1673 - RNA, 10 nt, Unknown
  source: /note="Description of Unknown: Exemplary gene or splice site sequence"
cuagugagua

SEQ ID NO: 1674 - RNA, 10 nt, Unknown
  source: /note="Description of Unknown: Exemplary gene or splice site sequence"
cucguaagca

SEQ ID NO: 1675 - RNA, 10 nt, Unknown
  source: /note="Description of Unknown: Exemplary gene or splice site sequence"
cucguaagug

SEQ ID NO: 1676 - RNA, 10 nt, Unknown
  source: /note="Description of Unknown: Exemplary gene or splice site sequence"
cucguaaguu

SEQ ID NO: 1677 - RNA, 10 nt, Unknown
  source: /note="Description of Unknown: Exemplary gene or splice site sequence"
cucguaucug

SEQ ID NO: 1678 - RNA, 10 nt, Unknown
  source: /note="Description of Unknown: Exemplary gene or splice site sequence"
cucgucugug

SEQ ID NO: 1679 - RNA, 10 nt, Unknown
  source: /note="Description of Unknown: Exemplary gene or splice site sequence"
cucgugaaua

SEQ ID NO: 1680 - RNA, 10 nt, Unknown
  source: /note="Description of Unknown: Exemplary gene or splice site sequence"
cucgugagua

SEQ ID NO: 1681 - RNA, 10 nt, Unknown
  source: /note="Description of Unknown: Exemplary gene or splice site sequence"
cucgugauua

SEQ ID NO: 1682 - RNA, 10 nt, Unknown
  source: /note="Description of Unknown: Exemplary gene or splice site sequence"
cugguaaaaa

SEQ ID NO: 1683 - RNA, 10 nt, Unknown
  source: /note="Description of Unknown: Exemplary gene or splice site sequence"
cugguaaaau

SEQ ID NO: 1684 - RNA, 10 nt, Unknown
  source: /note="Description of Unknown: Exemplary gene or splice site sequence"
cugguaaacc

SEQ ID NO: 1685 - RNA, 10 nt, Unknown
  source: /note="Description of Unknown: Exemplary gene or splice site sequence"
cugguaaacg

SEQ ID NO: 1686 - RNA, 10 nt, Unknown
  source: /note="Description of Unknown: Exemplary gene or splice site sequence"
cugguaaagc

SEQ ID NO: 1687 - RNA, 10 nt, Unknown
  source: /note="Description of Unknown: Exemplary gene or splice site sequence"
cugguaaaua

SEQ ID NO: 1688 - RNA, 10 nt, Unknown
  source: /note="Description of Unknown: Exemplary gene or splice site sequence"
cugguaaauc

SEQ ID NO: 1689 - RNA, 10 nt, Unknown
  source: /note="Description of Unknown: Exemplary gene or splice site sequence"
cugguaaaug

SEQ ID NO: 1690 - RNA, 10 nt, Unknown
  source: /note="Description of Unknown: Exemplary gene or splice site sequence"
cugguaaauu

SEQ ID NO: 1691 - RNA, 10 nt, Unknown
  source: /note="Description of Unknown: Exemplary gene or splice site sequence"
cugguaacac

SEQ ID NO: 1692 - RNA, 10 nt, Unknown
  source: /note="Description of Unknown: Exemplary gene or splice site sequence"
cugguaacag

SEQ ID NO: 1693 - RNA, 10 nt, Unknown
  source: /note="Description of Unknown: Exemplary gene or splice site sequence"
cugguaaccc

SEQ ID NO: 1694 - RNA, 10 nt, Unknown
  source: /note="Description of Unknown: Exemplary gene or splice site sequence"
cugguaaccg

SEQ ID NO: 1695 - RNA, 10 nt, Unknown
  source: /note="Description of Unknown: Exemplary gene or splice site sequence"
cugguaacug

SEQ ID NO: 1696 - RNA, 10 nt, Unknown
  source: /note="Description of Unknown: Exemplary gene or splice site sequence"
cugguaacuu

SEQ ID NO: 1697 - RNA, 10 nt, Unknown
  source: /note="Description of Unknown: Exemplary gene or splice site sequence"
cugguaagaa

SEQ ID NO: 1698 - RNA, 10 nt, Unknown
  source: /note="Description of Unknown: Exemplary gene or splice site sequence"
cugguaagag

SEQ ID NO: 1699 - RNA, 10 nt, Unknown
  source: /note="Description of Unknown: Exemplary gene or splice site sequence"
cugguaagau

SEQ ID NO: 1700 - RNA, 10 nt, Unknown
  source: /note="Description of Unknown: Exemplary gene or splice site sequence"
cugguaagca

SEQ ID NO: 1701 - RNA, 10 nt, Unknown
  source: /note="Description of Unknown: Exemplary gene or splice site sequence"
cugguaagcc

SEQ ID NO: 1702 - RNA, 10 nt, Unknown
  source: /note="Description of Unknown: Exemplary gene or splice site sequence"
cugguaagcu

SEQ ID NO: 1703 - RNA, 10 nt, Unknown
  source: /note="Description of Unknown: Exemplary gene or splice site sequence"
cugguaagga

SEQ ID NO: 1704 - RNA, 10 nt, Unknown
  source: /note="Description of Unknown: Exemplary gene or splice site sequence"
cugguaaggc

SEQ ID NO: 1705 - RNA, 10 nt, Unknown
  source: /note="Description of Unknown: Exemplary gene or splice site sequence"
cugguaaggg

SEQ ID NO: 1706 - RNA, 10 nt, Unknown
  source: /note="Description of Unknown: Exemplary gene or splice site sequence"
cugguaaggu

SEQ ID NO: 1707 - RNA, 10 nt, Unknown
  source: /note="Description of Unknown: Exemplary gene or splice site sequence"
cugguaagua

SEQ ID NO: 1708 - RNA, 10 nt, Unknown
  source: /note="Description of Unknown: Exemplary gene or splice site sequence"
cugguaagug

SEQ ID NO: 1709 - RNA, 10 nt, Unknown
  source: /note="Description of Unknown: Exemplary gene or splice site sequence"
cugguaaguu

SEQ ID NO: 1710 - RNA, 10 nt, Unknown
  source: /note="Description of Unknown: Exemplary gene or splice site sequence"
cugguaauga

SEQ ID NO: 1711 - RNA, 10 nt, Unknown
  source: /note="Description of Unknown: Exemplary gene or splice site sequence"
cugguaaugc

SEQ ID NO: 1712 - RNA, 10 nt, Unknown
  source: /note="Description of Unknown: Exemplary gene or splice site sequence"
cugguaauuc

SEQ ID NO: 1713 - RNA, 10 nt, Unknown
  source: /note="Description of Unknown: Exemplary gene or splice site sequence"
cugguaauuu

SEQ ID NO: 1714 - RNA, 10 nt, Unknown
  source: /note="Description of Unknown: Exemplary gene or splice site sequence"
cugguacaac

SEQ ID NO: 1715 - RNA, 10 nt, Unknown
  source: /note="Description of Unknown: Exemplary gene or splice site sequence"
cugguacaau

SEQ ID NO: 1716 - RNA, 10 nt, Unknown
  source: /note="Description of Unknown: Exemplary gene or splice site sequence"
cugguacaga

SEQ ID NO: 1717 - RNA, 10 nt, Unknown
  source: /note="Description of Unknown: Exemplary gene or splice site sequence"
cugguacaua

SEQ ID NO: 1718 - RNA, 10 nt, Unknown
  source: /note="Description of Unknown: Exemplary gene or splice site sequence"
cugguacauu

SEQ ID NO: 1719 - RNA, 10 nt, Unknown
  source: /note="Description of Unknown: Exemplary gene or splice site sequence"
cugguaccau

SEQ ID NO: 1720 - RNA, 10 nt, Unknown
  source: /note="Description of Unknown: Exemplary gene or splice site sequence"
cugguacguu

SEQ ID NO: 1721 - RNA, 10 nt, Unknown
  source: /note="Description of Unknown: Exemplary gene or splice site sequence"
cugguacuaa

SEQ ID NO: 1722 - RNA, 10 nt, Unknown
  source: /note="Description of Unknown: Exemplary gene or splice site sequence"
cugguacuug

SEQ ID NO: 1723 - RNA, 10 nt, Unknown
  source: /note="Description of Unknown: Exemplary gene or splice site sequence"
cugguacuuu

SEQ ID NO: 1724 - RNA, 10 nt, Unknown
  source: /note="Description of Unknown: Exemplary gene or splice site sequence"
cugguagaga

SEQ ID NO: 1725 - RNA, 10 nt, Unknown
  source: /note="Description of Unknown: Exemplary gene or splice site sequence"
cugguagaua

SEQ ID NO: 1726 - RNA, 10 nt, Unknown
  source: /note="Description of Unknown: Exemplary gene or splice site sequence"
cugguagcgu

SEQ ID NO: 1727 - RNA, 10 nt, Unknown
  source: /note="Description of Unknown: Exemplary gene or splice site sequence"
cugguaggau

SEQ ID NO: 1728 - RNA, 10 nt, Unknown
  source: /note="Description of Unknown: Exemplary gene or splice site sequence"
cugguaggca

SEQ ID NO: 1729 - RNA, 10 nt, Unknown
  source: /note="Description of Unknown: Exemplary gene or splice site sequence"
cugguaggua

SEQ ID NO: 1730 - RNA, 10 nt, Unknown
  source: /note="Description of Unknown: Exemplary gene or splice site sequence"
cugguagguc

SEQ ID NO: 1731 - RNA, 10 nt, Unknown
  source: /note="Description of Unknown: Exemplary gene or splice site sequence"
cugguaggug

SEQ ID NO: 1732 - RNA, 10 nt, Unknown
  source: /note="Description of Unknown: Exemplary gene or splice site sequence"
cugguaucaa

SEQ ID NO: 1733 - RNA, 10 nt, Unknown
  source: /note="Description of Unknown: Exemplary gene or splice site sequence"
cugguaugau

SEQ ID NO: 1734 - RNA, 10 nt, Unknown
  source: /note="Description of Unknown: Exemplary gene or splice site sequence"
cugguauggc

SEQ ID NO: 1735 - RNA, 10 nt, Unknown
  source: /note="Description of Unknown: Exemplary gene or splice site sequence"
cugguauggu

SEQ ID NO: 1736 - RNA, 10 nt, Unknown
  source: /note="Description of Unknown: Exemplary gene or splice site sequence"
cugguaugua

SEQ ID NO: 1737 - RNA, 10 nt, Unknown
  source: /note="Description of Unknown: Exemplary gene or splice site sequence"
cugguaugug

SEQ ID NO: 1738 - RNA, 10 nt, Unknown
  source: /note="Description of Unknown: Exemplary gene or splice site sequence"
cugguauguu

SEQ ID NO: 1739 - RNA, 10 nt, Unknown
  source: /note="Description of Unknown: Exemplary gene or splice site sequence"
cugguauuga

SEQ ID NO: 1740 - RNA, 10 nt, Unknown
  source: /note="Description of Unknown: Exemplary gene or splice site sequence"
cugguauuuc

SEQ ID NO: 1741 - RNA, 10 nt, Unknown
  source: /note="Description of Unknown: Exemplary gene or splice site sequence"
cugguauuuu

SEQ ID NO: 1742 - RNA, 10 nt, Unknown
  source: /note="Description of Unknown: Exemplary gene or splice site sequence"
cuggucaaca

SEQ ID NO: 1743 - RNA, 10 nt, Unknown
  source: /note="Description of Unknown: Exemplary gene or splice site sequence"
cuggucagag

SEQ ID NO: 1744 - RNA, 10 nt, Unknown
  source: /note="Description of Unknown: Exemplary gene or splice site sequence"
cuggucccgc

SEQ ID NO: 1745 - RNA, 10 nt, Unknown
  source: /note="Description of Unknown: Exemplary gene or splice site sequence"
cuggucggua

SEQ ID NO: 1746 - RNA, 10 nt, Unknown
  source: /note="Description of Unknown: Exemplary gene or splice site sequence"
cuggucuggg

SEQ ID NO: 1747 - RNA, 10 nt, Unknown
  source: /note="Description of Unknown: Exemplary gene or splice site sequence"
cuggugaagu

SEQ ID NO: 1748 - RNA, 10 nt, Unknown
  source: /note="Description of Unknown: Exemplary gene or splice site sequence"
cuggugaaua

SEQ ID NO: 1749 - RNA, 10 nt, Unknown
  source: /note="Description of Unknown: Exemplary gene or splice site sequence"
cuggugaauu

SEQ ID NO: 1750 - RNA, 10 nt, Unknown
  source: /note="Description of Unknown: Exemplary gene or splice site sequence"
cuggugacua

SEQ ID NO: 1751 - RNA, 10 nt, Unknown
  source: /note="Description of Unknown: Exemplary gene or splice site sequence"
cuggugagaa

SEQ ID NO: 1752 - RNA, 10 nt, Unknown
  source: /note="Description of Unknown: Exemplary gene or splice site sequence"
cuggugagac

SEQ ID NO: 1753 - RNA, 10 nt, Unknown
  source: /note="Description of Unknown: Exemplary gene or splice site sequence"
cuggugagca

SEQ ID NO: 1754 - RNA, 10 nt, Unknown
  source: /note="Description of Unknown: Exemplary gene or splice site sequence"
cuggugagcu

SEQ ID NO: 1755 - RNA, 10 nt, Unknown
  source: /note="Description of Unknown: Exemplary gene or splice site sequence"
cuggugagga

SEQ ID NO: 1756 - RNA, 10 nt, Unknown
  source: /note="Description of Unknown: Exemplary gene or splice site sequence"
cuggugaggc

SEQ ID NO: 1757 - RNA, 10 nt, Unknown
  source: /note="Description of Unknown: Exemplary gene or splice site sequence"
cuggugaggg

SEQ ID NO: 1758 - RNA, 10 nt, Unknown
  source: /note="Description of Unknown: Exemplary gene or splice site sequence"
cuggugaggu

SEQ ID NO: 1759 - RNA, 10 nt, Unknown
  source: /note="Description of Unknown: Exemplary gene or splice site sequence"
cuggugagua

SEQ ID NO: 1760 - RNA, 10 nt, Unknown
  source: /note="Description of Unknown: Exemplary gene or splice site sequence"
cuggugaguc

SEQ ID NO: 1761 - RNA, 10 nt, Unknown
  source: /note="Description of Unknown: Exemplary gene or splice site sequence"
cuggugagug

SEQ ID NO: 1762 - RNA, 10 nt, Unknown
  source: /note="Description of Unknown: Exemplary gene or splice site sequence"
cuggugaguu

SEQ ID NO: 1763 - RNA, 10 nt, Unknown
  source: /note="Description of Unknown: Exemplary gene or splice site sequence"
cuggugauua

SEQ ID NO: 1764 - RNA, 10 nt, Unknown
  source: /note="Description of Unknown: Exemplary gene or splice site sequence"
cuggugauuu

SEQ ID NO: 1765 - RNA, 10 nt, Unknown
  source: /note="Description of Unknown: Exemplary gene or splice site sequence"
cuggugcaga

SEQ ID NO: 1766 - RNA, 10 nt, Unknown
  source: /note="Description of Unknown: Exemplary gene or splice site sequence"
cuggugcgcu

SEQ ID NO: 1767 - RNA, 10 nt, Unknown
  source: /note="Description of Unknown: Exemplary gene or splice site sequence"
cuggugcgug

SEQ ID NO: 1768 - RNA, 10 nt, Unknown
  source: /note="Description of Unknown: Exemplary gene or splice site sequence"
cuggugcuga

SEQ ID NO: 1769 - RNA, 10 nt, Unknown
  source: /note="Description of Unknown: Exemplary gene or splice site sequence"
cuggugggag

SEQ ID NO: 1770 - RNA, 10 nt, Unknown
  source: /note="Description of Unknown: Exemplary gene or splice site sequence"
cuggugggga

SEQ ID NO: 1771 - RNA, 10 nt, Unknown
  source: /note="Description of Unknown: Exemplary gene or splice site sequence"
cuggugggua

SEQ ID NO: 1772 - RNA, 10 nt, Unknown
  source: /note="Description of Unknown: Exemplary gene or splice site sequence"
cugguggguc

SEQ ID NO: 1773 - RNA, 10 nt, Unknown
  source: /note="Description of Unknown: Exemplary gene or splice site sequence"
cuggugggug

SEQ ID NO: 1774 - RNA, 10 nt, Unknown
  source: /note="Description of Unknown: Exemplary gene or splice site sequence"
cugguggguu

SEQ ID NO: 1775 - RNA, 10 nt, Unknown
  source: /note="Description of Unknown: Exemplary gene or splice site sequence"
cuggugugaa

SEQ ID NO: 1776 - RNA, 10 nt, Unknown
  source: /note="Description of Unknown: Exemplary gene or splice site sequence"
cuggugugca

SEQ ID NO: 1777 - RNA, 10 nt, Unknown
  source: /note="Description of Unknown: Exemplary gene or splice site sequence"
cuggugugcu

SEQ ID NO: 1778 - RNA, 10 nt, Unknown
  source: /note="Description of Unknown: Exemplary gene or splice site sequence"
cugguguggu

SEQ ID NO: 1779 - RNA, 10 nt, Unknown
  source: /note="Description of Unknown: Exemplary gene or splice site sequence"
cuggugugug

SEQ ID NO: 1780 - RNA, 10 nt, Unknown
  source: /note="Description of Unknown: Exemplary gene or splice site sequence"
cugguguguu

SEQ ID NO: 1781 - RNA, 10 nt, Unknown
  source: /note="Description of Unknown: Exemplary gene or splice site sequence"
cugguuagcu

SEQ ID NO: 1782 - RNA, 10 nt, Unknown
  source: /note="Description of Unknown: Exemplary gene or splice site sequence"
cugguuagug

SEQ ID NO: 1783 - RNA, 10 nt, Unknown
  source: /note="Description of Unknown: Exemplary gene or splice site sequence"
cugguucgug

SEQ ID NO: 1784 - RNA, 10 nt, Unknown
  source: /note="Description of Unknown: Exemplary gene or splice site sequence"
cugguuggcu

SEQ ID NO: 1785 - RNA, 10 nt, Unknown
  source: /note="Description of Unknown: Exemplary gene or splice site sequence"
cugguuguuu

SEQ ID NO: 1786 - RNA, 10 nt, Unknown
  source: /note="Description of Unknown: Exemplary gene or splice site sequence"
cugguuugua

SEQ ID NO: 1787 - RNA, 10 nt, Unknown
  source: /note="Description of Unknown: Exemplary gene or splice site sequence"
cugguuuguc

SEQ ID NO: 1788 - RNA, 10 nt, Unknown
  source: /note="Description of Unknown: Exemplary gene or splice site sequence"
cugguuugug

SEQ ID NO: 1789 - RNA, 10 nt, Unknown
  source: /note="Description of Unknown: Exemplary gene or splice site sequence"
cuuguaaaug

SEQ ID NO: 1790 - RNA, 10 nt, Unknown
  source: /note="Description of Unknown: Exemplary gene or splice site sequence"
cuuguaagcu

SEQ ID NO: 1791 - RNA, 10 nt, Unknown
  source: /note="Description of Unknown: Exemplary gene or splice site sequence"
cuuguaagga

SEQ ID NO: 1792 - RNA, 10 nt, Unknown
  source: /note="Description of Unknown: Exemplary gene or splice site sequence"
cuuguaaggc

SEQ ID NO: 1793 - RNA, 10 nt, Unknown
  source: /note="Description of Unknown: Exemplary gene or splice site sequence"
cuuguaagua

SEQ ID NO: 1794 - RNA, 10 nt, Unknown
  source: /note="Description of Unknown: Exemplary gene or splice site sequence"
cuuguaagug

SEQ ID NO: 1795 - RNA, 10 nt, Unknown
  source: /note="Description of Unknown: Exemplary gene or splice site sequence"
cuuguaaguu

SEQ ID NO: 1796 - RNA, 10 nt, Unknown
  source: /note="Description of Unknown: Exemplary gene or splice site sequence"
cuuguacguc

SEQ ID NO: 1797 - RNA, 10 nt, Unknown
  source: /note="Description of Unknown: Exemplary gene or splice site sequence"
cuuguacgug

SEQ ID NO: 1798 - RNA, 10 nt, Unknown
  source: /note="Description of Unknown: Exemplary gene or splice site sequence"
cuuguaggua

SEQ ID NO: 1799 - RNA, 10 nt, Unknown
  source: /note="Description of Unknown: Exemplary gene or splice site sequence"
cuuguagugc

SEQ ID NO: 1800 - RNA, 10 nt, Unknown
  source: /note="Description of Unknown: Exemplary gene or splice site sequence"
cuuguauagg

SEQ ID NO: 1801 - RNA, 10 nt, Unknown
  source: /note="Description of Unknown: Exemplary gene or splice site sequence"
cuugucagua

SEQ ID NO: 1802 - RNA, 10 nt, Unknown
  source: /note="Description of Unknown: Exemplary gene or splice site sequence"
cuugugagua

SEQ ID NO: 1803 - RNA, 10 nt, Unknown
  source: /note="Description of Unknown: Exemplary gene or splice site sequence"
cuugugaguc

SEQ ID NO: 1804 - RNA, 10 nt, Unknown
  source: /note="Description of Unknown: Exemplary gene or splice site sequence"
cuugugaguu

SEQ ID NO: 1805 - RNA, 10 nt, Unknown
  source: /note="Description of Unknown: Exemplary gene or splice site sequence"
cuuguggguu

SEQ ID NO: 1806 - RNA, 10 nt, Unknown
  source: /note="Description of Unknown: Exemplary gene or splice site sequence"
cuugugugua

SEQ ID NO: 1807 - RNA, 10 nt, Unknown
  source: /note="Description of Unknown: Exemplary gene or splice site sequence"
cuuguuagug

SEQ ID NO: 1808 - RNA, 10 nt, Unknown
  source: /note="Description of Unknown: Exemplary gene or splice site sequence"
cuuguuugag

SEQ ID NO: 1809 - RNA, 10 nt, Unknown
  source: /note="Description of Unknown: Exemplary gene or splice site sequence"
gaaguaaaac

SEQ ID NO: 1810 - RNA, 10 nt, Unknown
  source: /note="Description of Unknown: Exemplary gene or splice site sequence"
gaaguaaagc

SEQ ID NO: 1811 - RNA, 10 nt, Unknown
  source: /note="Description of Unknown: Exemplary gene or splice site sequence"
gaaguaaagu

SEQ ID NO: 1812 - RNA, 10 nt, Unknown
  source: /note="Description of Unknown: Exemplary gene or splice site sequence"
gaaguaaaua

SEQ ID NO: 1813 - RNA, 10 nt, Unknown
  source: /note="Description of Unknown: Exemplary gene or splice site sequence"
gaaguaaauu

SEQ ID NO: 1814 - RNA, 10 nt, Unknown
  source: /note="Description of Unknown: Exemplary gene or splice site sequence"
gaaguaagaa

SEQ ID NO: 1815 - RNA, 10 nt, Unknown
  source: /note="Description of Unknown: Exemplary gene or splice site sequence"
gaaguaagcc

SEQ ID NO: 1816 - RNA, 10 nt, Unknown
  source: /note="Description of Unknown: Exemplary gene or splice site sequence"
gaaguaagcu

SEQ ID NO: 1817 - RNA, 10 nt, Unknown
  source: /note="Description of Unknown: Exemplary gene or splice site sequence"
gaaguaagga

SEQ ID NO: 1818 - RNA, 10 nt, Unknown
  source: /note="Description of Unknown: Exemplary gene or splice site sequence"
gaaguaagua

SEQ ID NO: 1819 - RNA, 10 nt, Unknown
  source: /note="Description of Unknown: Exemplary gene or splice site sequence"
gaaguaagug

SEQ ID NO: 1820 - RNA, 10 nt, Unknown
  source: /note="Description of Unknown: Exemplary gene or splice site sequence"
gaaguaaguu

SEQ ID NO: 1821 - RNA, 10 nt, Unknown
  source: /note="Description of Unknown: Exemplary gene or splice site sequence"
gaaguaauau

SEQ ID NO: 1822 - RNA, 10 nt, Unknown
  source: /note="Description of Unknown: Exemplary gene or splice site sequence"
gaaguaaugc

SEQ ID NO: 1823 - RNA, 10 nt, Unknown
  source: /note="Description of Unknown: Exemplary gene or splice site sequence"
gaaguaauua

SEQ ID NO: 1824 - RNA, 10 nt, Unknown
  source: /note="Description of Unknown: Exemplary gene or splice site sequence"
gaaguaauuu

SEQ ID NO: 1825 - RNA, 10 nt, Unknown
  source: /note="Description of Unknown: Exemplary gene or splice site sequence"
gaaguaccau

SEQ ID NO: 1826 - RNA, 10 nt, Unknown
  source: /note="Description of Unknown: Exemplary gene or splice site sequence"
gaaguacgua

SEQ ID NO: 1827 - RNA, 10 nt, Unknown
  source: /note="Description of Unknown: Exemplary gene or splice site sequence"
gaaguacguc

SEQ ID NO: 1828 - RNA, 10 nt, Unknown
  source: /note="Description of Unknown: Exemplary gene or splice site sequence"
gaaguaggca

SEQ ID NO: 1829 - RNA, 10 nt, Unknown
  source: /note="Description of Unknown: Exemplary gene or splice site sequence"
gaaguagguc

SEQ ID NO: 1830 - RNA, 10 nt, Unknown
  source: /note="Description of Unknown: Exemplary gene or splice site sequence"
gaaguauaaa

SEQ ID NO: 1831 - RNA, 10 nt, Unknown
  source: /note="Description of Unknown: Exemplary gene or splice site sequence"
gaaguaugcu

SEQ ID NO: 1832 - RNA, 10 nt, Unknown
  source: /note="Description of Unknown: Exemplary gene or splice site sequence"
gaaguaugug

SEQ ID NO: 1833 - RNA, 10 nt, Unknown
  source: /note="Description of Unknown: Exemplary gene or splice site sequence"
gaaguauguu

SEQ ID NO: 1834 - RNA, 10 nt, Unknown
  source: /note="Description of Unknown: Exemplary gene or splice site sequence"
gaaguauuaa

SEQ ID NO: 1835 - RNA, 10 nt, Unknown
  source: /note="Description of Unknown: Exemplary gene or splice site sequence"
gaagucagug

SEQ ID NO: 1836 - RNA, 10 nt, Unknown
  source: /note="Description of Unknown: Exemplary gene or splice site sequence"
gaagugagag

SEQ ID NO: 1837 - RNA, 10 nt, Unknown
  source: /note="Description of Unknown: Exemplary gene or splice site sequence"
gaagugagcg

SEQ ID NO: 1838 - RNA, 10 nt, Unknown
  source: /note="Description of Unknown: Exemplary gene or splice site sequence"
gaagugaggu

SEQ ID NO: 1839 - RNA, 10 nt, Unknown
  source: /note="Description of Unknown: Exemplary gene or splice site sequence"
gaagugaguc

SEQ ID NO: 1840 - RNA, 10 nt, Unknown
  source: /note="Description of Unknown: Exemplary gene or splice site sequence"
gaagugagug

SEQ ID NO: 1841 - RNA, 10 nt, Unknown
  source: /note="Description of Unknown: Exemplary gene or splice site sequence"
gaagugaguu

SEQ ID NO: 1842 - RNA, 10 nt, Unknown
  source: /note="Description of Unknown: Exemplary gene or splice site sequence"
gaagugauaa

SEQ ID NO: 1843 - RNA, 10 nt, Unknown
  source: /note="Description of Unknown: Exemplary gene or splice site sequence"
gaagugauuc

SEQ ID NO: 1844 - RNA, 10 nt, Unknown
  source: /note="Description of Unknown: Exemplary gene or splice site sequence"
gaagugcgug

SEQ ID NO: 1845 - RNA, 10 nt, Unknown
  source: /note="Description of Unknown: Exemplary gene or splice site sequence"
gaaguguggg

SEQ ID NO: 1846 - RNA, 10 nt, Unknown
  source: /note="Description of Unknown: Exemplary gene or splice site sequence"
gaaguguguc

SEQ ID NO: 1847 - RNA, 10 nt, Unknown
  source: /note="Description of Unknown: Exemplary gene or splice site sequence"
gaaguuggug

SEQ ID NO: 1848 - RNA, 10 nt, Unknown
  source: /note="Description of Unknown: Exemplary gene or splice site sequence"
gacguaaagu

SEQ ID NO: 1849 - RNA, 10 nt, Unknown
  source: /note="Description of Unknown: Exemplary gene or splice site sequence"
gacguaagcu

SEQ ID NO: 1850 - RNA, 10 nt, Unknown
  source: /note="Description of Unknown: Exemplary gene or splice site sequence"
gacguaagua

SEQ ID NO: 1851 - RNA, 10 nt, Unknown
  source: /note="Description of Unknown: Exemplary gene or splice site sequence"
gacguaaugg

SEQ ID NO: 1852 - RNA, 10 nt, Unknown
  source: /note="Description of Unknown: Exemplary gene or splice site sequence"
gacguaugcc

SEQ ID NO: 1853 - RNA, 10 nt, Unknown
  source: /note="Description of Unknown: Exemplary gene or splice site sequence"
gacguauguu

SEQ ID NO: 1854 - RNA, 10 nt, Unknown
  source: /note="Description of Unknown: Exemplary gene or splice site sequence"
gacgugagcc

SEQ ID NO: 1855 - RNA, 10 nt, Unknown
  source: /note="Description of Unknown: Exemplary gene or splice site sequence"
gacgugagug

SEQ ID NO: 1856 - RNA, 10 nt, Unknown
  source: /note="Description of Unknown: Exemplary gene or splice site sequence"
gaggcaaaug

SEQ ID NO: 1857 - RNA, 10 nt, Unknown
  source: /note="Description of Unknown: Exemplary gene or splice site sequence"
gaggcaagag

SEQ ID NO: 1858 - RNA, 10 nt, Unknown
  source: /note="Description of Unknown: Exemplary gene or splice site sequence"
gaggcaagua

SEQ ID NO: 1859 - RNA, 10 nt, Unknown
  source: /note="Description of Unknown: Exemplary gene or splice site sequence"
gaggcaagug

SEQ ID NO: 1860 - RNA, 10 nt, Unknown
  source: /note="Description of Unknown: Exemplary gene or splice site sequence"
gaggcaaguu

SEQ ID NO: 1861 - RNA, 10 nt, Unknown
  source: /note="Description of Unknown: Exemplary gene or splice site sequence"
gaggcacgag

SEQ ID NO: 1862 - RNA, 10 nt, Unknown
  source: /note="Description of Unknown: Exemplary gene or splice site sequence"
gaggcaggga

SEQ ID NO: 1863 - RNA, 10 nt, Unknown
  source: /note="Description of Unknown: Exemplary gene or splice site sequence"
gaggcaugug

SEQ ID NO: 1864 - RNA, 10 nt, Unknown
  source: /note="Description of Unknown: Exemplary gene or splice site sequence"
gaggcgaagg

SEQ ID NO: 1865 - RNA, 10 nt, Unknown
  source: /note="Description of Unknown: Exemplary gene or splice site sequence"
gagguaaaaa

SEQ ID NO: 1866 - RNA, 10 nt, Unknown
  source: /note="Description of Unknown: Exemplary gene or splice site sequence"
gagguaaaac

SEQ ID NO: 1867 - RNA, 10 nt, Unknown
  source: /note="Description of Unknown: Exemplary gene or splice site sequence"
gagguaaaag

SEQ ID NO: 1868 - RNA, 10 nt, Unknown
  source: /note="Description of Unknown: Exemplary gene or splice site sequence"
gagguaaaau

SEQ ID NO: 1869 - RNA, 10 nt, Unknown
  source: /note="Description of Unknown: Exemplary gene or splice site sequence"
gagguaaacc

SEQ ID NO: 1870 - RNA, 10 nt, Unknown
  source: /note="Description of Unknown: Exemplary gene or splice site sequence"
gagguaaaga

SEQ ID NO: 1871 - RNA, 10 nt, Unknown
  source: /note="Description of Unknown: Exemplary gene or splice site sequence"
gagguaaagc

SEQ ID NO: 1872 - RNA, 10 nt, Unknown
  source: /note="Description of Unknown: Exemplary gene or splice site sequence"
gagguaaagu

SEQ ID NO: 1873 - RNA, 10 nt, Unknown
  source: /note="Description of Unknown: Exemplary gene or splice site sequence"
gagguaaaua

SEQ ID NO: 1874 - RNA, 10 nt, Unknown
  source: /note="Description of Unknown: Exemplary gene or splice site sequence"
gagguaaauc

SEQ ID NO: 1875 - RNA, 10 nt, Unknown
  source: /note="Description of Unknown: Exemplary gene or splice site sequence"
gagguaaaug

SEQ ID NO: 1876 - RNA, 10 nt, Unknown
  source: /note="Description of Unknown: Exemplary gene or splice site sequence"
gagguaaauu

SEQ ID NO: 1877 - RNA, 10 nt, Unknown
  source: /note="Description of Unknown: Exemplary gene or splice site sequence"
gagguaacaa

SEQ ID NO: 1878 - RNA, 10 nt, Unknown
  source: /note="Description of Unknown: Exemplary gene or splice site sequence"
gagguaacag

SEQ ID NO: 1879 - RNA, 10 nt, Unknown
  source: /note="Description of Unknown: Exemplary gene or splice site sequence"
gagguaacca

SEQ ID NO: 1880 - RNA, 10 nt, Unknown
  source: /note="Description of Unknown: Exemplary gene or splice site sequence"
gagguaaccu

SEQ ID NO: 1881 - RNA, 10 nt, Unknown
  source: /note="Description of Unknown: Exemplary gene or splice site sequence"
gagguaacuu

SEQ ID NO: 1882 - RNA, 10 nt, Unknown
  source: /note="Description of Unknown: Exemplary gene or splice site sequence"
gagguaagaa

SEQ ID NO: 1883 - RNA, 10 nt, Unknown
  source: /note="Description of Unknown: Exemplary gene or splice site sequence"
gagguaagag

SEQ ID NO: 1884 - RNA, 10 nt, Unknown
  source: /note="Description of Unknown: Exemplary gene or splice site sequence"
gagguaagau

SEQ ID NO: 1885 - RNA, 10 nt, Unknown
  source: /note="Description of Unknown: Exemplary gene or splice site sequence"
gagguaagca

SEQ ID NO: 1886 - RNA, 10 nt, Unknown
  source: /note="Description of Unknown: Exemplary gene or splice site sequence"
gagguaagcc

SEQ ID NO: 1887 - RNA, 10 nt, Unknown
  source: /note="Description of Unknown: Exemplary gene or splice site sequence"
gagguaagcg

SEQ ID NO: 1888 - RNA, 10 nt, Unknown
  source: /note="Description of Unknown: Exemplary gene or splice site sequence"
gagguaagcu

SEQ ID NO: 1889 - RNA, 10 nt, Unknown
  source: /note="Description of Unknown: Exemplary gene or splice site sequence"
gagguaagga

SEQ ID NO: 1890 - RNA, 10 nt, Unknown
  source: /note="Description of Unknown: Exemplary gene or splice site sequence"
gagguaaggc

SEQ ID NO: 1891 - RNA, 10 nt, Unknown
  source: /note="Description of Unknown: Exemplary gene or splice site sequence"
gagguaaggg

SEQ ID NO: 1892 - RNA, 10 nt, Unknown
  source: /note="Description of Unknown: Exemplary gene or splice site sequence"
gagguaaggu

SEQ ID NO: 1893 - RNA, 10 nt, Unknown
  source: /note="Description of Unknown: Exemplary gene or splice site sequence"
gagguaagua

SEQ ID NO: 1894 - RNA, 10 nt, Unknown
  source: /note="Description of Unknown: Exemplary gene or splice site sequence"
gagguaaguc

SEQ ID NO: 1895 - RNA, 10 nt, Unknown
  source: /note="Description of Unknown: Exemplary gene or splice site sequence"
gagguaauaa

SEQ ID NO: 1896 - RNA, 10 nt, Unknown
  source: /note="Description of Unknown: Exemplary gene or splice site sequence"
gagguaauac

SEQ ID NO: 1897 - RNA, 10 nt, Unknown
  source: /note="Description of Unknown: Exemplary gene or splice site sequence"
gagguaauau

SEQ ID NO: 1898 - RNA, 10 nt, Unknown
  source: /note="Description of Unknown: Exemplary gene or splice site sequence"
gagguaauca

SEQ ID NO: 1899 - RNA, 10 nt, Unknown
  source: /note="Description of Unknown: Exemplary gene or splice site sequence"
gagguaaucu

SEQ ID NO: 1900 - RNA, 10 nt, Unknown
  source: /note="Description of Unknown: Exemplary gene or splice site sequence"
gagguaaugg

SEQ ID NO: 1901 - RNA, 10 nt, Unknown
  source: /note="Description of Unknown: Exemplary gene or splice site sequence"
gagguaaugu

SEQ ID NO: 1902 - RNA, 10 nt, Unknown
  source: /note="Description of Unknown: Exemplary gene or splice site sequence"
gagguaauug

SEQ ID NO: 1903 - RNA, 10 nt, Unknown
  source: /note="Description of Unknown: Exemplary gene or splice site sequence"
gagguaauuu

SEQ ID NO: 1904 - RNA, 10 nt, Unknown
  source: /note="Description of Unknown: Exemplary gene or splice site sequence"
gagguacaaa

SEQ ID NO: 1905 - RNA, 10 nt, Unknown
  source: /note="Description of Unknown: Exemplary gene or splice site sequence"
gagguacaac

SEQ ID NO: 1906 - RNA, 10 nt, Unknown
  source: /note="Description of Unknown: Exemplary gene or splice site sequence"
gagguacaga

SEQ ID NO: 1907 - RNA, 10 nt, Unknown
  source: /note="Description of Unknown: Exemplary gene or splice site sequence"
gagguacagc

SEQ ID NO: 1908 - RNA, 10 nt, Unknown
  source: /note="Description of Unknown: Exemplary gene or splice site sequence"
gagguacagu

SEQ ID NO: 1909 - RNA, 10 nt, Unknown
  source: /note="Description of Unknown: Exemplary gene or splice site sequence"
gagguacaua

SEQ ID NO: 1910 - RNA, 10 nt, Unknown
  source: /note="Description of Unknown: Exemplary gene or splice site sequence"
gagguacauu

SEQ ID NO: 1911 - RNA, 10 nt, Unknown
  source: /note="Description of Unknown: Exemplary gene or splice site sequence"
gagguaccag

SEQ ID NO: 1912 - RNA, 10 nt, Unknown
  source: /note="Description of Unknown: Exemplary gene or splice site sequence"
gagguaccga

SEQ ID NO: 1913 - RNA, 10 nt, Unknown
  source: /note="Description of Unknown: Exemplary gene or splice site sequence"
gagguaccug

SEQ ID NO: 1914 - RNA, 10 nt, Unknown
  source: /note="Description of Unknown: Exemplary gene or splice site sequence"
gagguaccuu

SEQ ID NO: 1915 - RNA, 10 nt, Unknown
  source: /note="Description of Unknown: Exemplary gene or splice site sequence"
gagguacuag

SEQ ID NO: 1916 - RNA, 10 nt, Unknown
  source: /note="Description of Unknown: Exemplary gene or splice site sequence"
gagguacuau

SEQ ID NO: 1917 - RNA, 10 nt, Unknown
  source: /note="Description of Unknown: Exemplary gene or splice site sequence"
gagguacucc

SEQ ID NO: 1918 - RNA, 10 nt, Unknown
  source: /note="Description of Unknown: Exemplary gene or splice site sequence"
gagguacugc

SEQ ID NO: 1919 - RNA, 10 nt, Unknown
  source: /note="Description of Unknown: Exemplary gene or splice site sequence"
gagguacugg

SEQ ID NO: 1920 - RNA, 10 nt, Unknown
  source: /note="Description of Unknown: Exemplary gene or splice site sequence"
gagguacugu

SEQ ID NO: 1921 - RNA, 10 nt, Unknown
  source: /note="Description of Unknown: Exemplary gene or splice site sequence"
gagguacuug

SEQ ID NO: 1922 - RNA, 10 nt, Unknown
  source: /note="Description of Unknown: Exemplary gene or splice site sequence"
gagguacuuu

SEQ ID NO: 1923 - RNA, 10 nt, Unknown
  source: /note="Description of Unknown: Exemplary gene or splice site sequence"
gagguagaag

SEQ ID NO: 1924 - RNA, 10 nt, Unknown
  source: /note="Description of Unknown: Exemplary gene or splice site sequence"
gagguagaga

SEQ ID NO: 1925 - RNA, 10 nt, Unknown
  source: /note="Description of Unknown: Exemplary gene or splice site sequence"
gagguagagg

SEQ ID NO: 1926 - RNA, 10 nt, Unknown
  source: /note="Description of Unknown: Exemplary gene or splice site sequence"
gagguagagu

SEQ ID NO: 1927 - RNA, 10 nt, Unknown
  source: /note="Description of Unknown: Exemplary gene or splice site sequence"
gagguagauc

SEQ ID NO: 1928 - RNA, 10 nt, Unknown
  source: /note="Description of Unknown: Exemplary gene or splice site sequence"
gagguagcua

SEQ ID NO: 1929 - RNA, 10 nt, Unknown
  source: /note="Description of Unknown: Exemplary gene or splice site sequence"
gagguagcug

SEQ ID NO: 1930 - RNA, 10 nt, Unknown
  source: /note="Description of Unknown: Exemplary gene or splice site sequence"
gagguaggaa

SEQ ID NO: 1931 - RNA, 10 nt, Unknown
  source: /note="Description of Unknown: Exemplary gene or splice site sequence"
gagguaggag

SEQ ID NO: 1932 - RNA, 10 nt, Unknown
  source: /note="Description of Unknown: Exemplary gene or splice site sequence"
gagguaggca

SEQ ID NO: 1933 - RNA, 10 nt, Unknown
  source: /note="Description of Unknown: Exemplary gene or splice site sequence"
gagguaggcu

SEQ ID NO: 1934 - RNA, 10 nt, Unknown
  source: /note="Description of Unknown: Exemplary gene or splice site sequence"
gagguaggga

SEQ ID NO: 1935 - RNA, 10 nt, Unknown
  source: /note="Description of Unknown: Exemplary gene or splice site sequence"
gagguagggc

SEQ ID NO: 1936 - RNA, 10 nt, Unknown
  source: /note="Description of Unknown: Exemplary gene or splice site sequence"
gagguagggg

SEQ ID NO: 1937 - RNA, 10 nt, Unknown
  source: /note="Description of Unknown: Exemplary gene or splice site sequence"
gagguaggua

SEQ ID NO: 1938 - RNA, 10 nt, Unknown
  source: /note="Description of Unknown: Exemplary gene or splice site sequence"
gagguaggug

SEQ ID NO: 1939 - RNA, 10 nt, Unknown
  source: /note="Description of Unknown: Exemplary gene or splice site sequence"
gagguagguu

SEQ ID NO: 1940 - RNA, 10 nt, Unknown
  source: /note="Description of Unknown: Exemplary gene or splice site sequence"
gagguaguaa

SEQ ID NO: 1941 - RNA, 10 nt, Unknown
  source: /note="Description of Unknown: Exemplary gene or splice site sequence"
gagguaguag

SEQ ID NO: 1942 - RNA, 10 nt, Unknown
  source: /note="Description of Unknown: Exemplary gene or splice site sequence"
gagguaguau

SEQ ID NO: 1943 - RNA, 10 nt, Unknown
  source: /note="Description of Unknown: Exemplary gene or splice site sequence"
gagguagucu

SEQ ID NO: 1944 - RNA, 10 nt, Unknown
  source: /note="Description of Unknown: Exemplary gene or splice site sequence"
gagguagugc

SEQ ID NO: 1945 - RNA, 10 nt, Unknown
  source: /note="Description of Unknown: Exemplary gene or splice site sequence"
gagguagugg

SEQ ID NO: 1946 - RNA, 10 nt, Unknown
  source: /note="Description of Unknown: Exemplary gene or splice site sequence"
gagguaguua

SEQ ID NO: 1947 - RNA, 10 nt, Unknown
  source: /note="Description of Unknown: Exemplary gene or splice site sequence"
gagguaguug

SEQ ID NO: 1948 - RNA, 10 nt, Unknown
  source: /note="Description of Unknown: Exemplary gene or splice site sequence"
gagguauaag

SEQ ID NO: 1949 - RNA, 10 nt, Unknown
  source: /note="Description of Unknown: Exemplary gene or splice site sequence"
gagguauacu

SEQ ID NO: 1950 - RNA, 10 nt, Unknown
  source: /note="Description of Unknown: Exemplary gene or splice site sequence"
gagguauagc

SEQ ID NO: 1951 - RNA, 10 nt, Unknown
  source: /note="Description of Unknown: Exemplary gene or splice site sequence"
gagguauaug

SEQ ID NO: 1952 - RNA, 10 nt, Unknown
  source: /note="Description of Unknown: Exemplary gene or splice site sequence"
gagguauauu

SEQ ID NO: 1953 - RNA, 10 nt, Unknown
  source: /note="Description of Unknown: Exemplary gene or splice site sequence"
gagguaucau

SEQ ID NO: 1954 - RNA, 10 nt, Unknown
  source: /note="Description of Unknown: Exemplary gene or splice site sequence"
gagguaucug

SEQ ID NO: 1955 - RNA, 10 nt, Unknown
  source: /note="Description of Unknown: Exemplary gene or splice site sequence"
gagguaucuu

SEQ ID NO: 1956 - RNA, 10 nt, Unknown
  source: /note="Description of Unknown: Exemplary gene or splice site sequence"
gagguaugaa

SEQ ID NO: 1957 - RNA, 10 nt, Unknown
  source: /note="Description of Unknown: Exemplary gene or splice site sequence"
gagguaugac

SEQ ID NO: 1958 - RNA, 10 nt, Unknown
  source: /note="Description of Unknown: Exemplary gene or splice site sequence"
gagguaugag

SEQ ID NO: 1959 - RNA, 10 nt, Unknown
  source: /note="Description of Unknown: Exemplary gene or splice site sequence"
gagguaugcc

SEQ ID NO: 1960 - RNA, 10 nt, Unknown
  source: /note="Description of Unknown: Exemplary gene or splice site sequence"
gagguaugcg

SEQ ID NO: 1961 - RNA, 10 nt, Unknown
  source: /note="Description of Unknown: Exemplary gene or splice site sequence"
gagguaugcu

SEQ ID NO: 1962 - RNA, 10 nt, Unknown
  source: /note="Description of Unknown: Exemplary gene or splice site sequence"
gagguaugga

SEQ ID NO: 1963 - RNA, 10 nt, Unknown
  source: /note="Description of Unknown: Exemplary gene or splice site sequence"
gagguauggg

SEQ ID NO: 1964 - RNA, 10 nt, Unknown
  source: /note="Description of Unknown: Exemplary gene or splice site sequence"
gagguauggu

SEQ ID NO: 1965 - RNA, 10 nt, Unknown
  source: /note="Description of Unknown: Exemplary gene or splice site sequence"
gagguaugua

SEQ ID NO: 1966 - RNA, 10 nt, Unknown
  source: /note="Description of Unknown: Exemplary gene or splice site sequence"
gagguauguc

SEQ ID NO: 1967 - RNA, 10 nt, Unknown
  source: /note="Description of Unknown: Exemplary gene or splice site sequence"
gagguaugug

SEQ ID NO: 1968 - RNA, 10 nt, Unknown
  source: /note="Description of Unknown: Exemplary gene or splice site sequence"
gagguauguu

SEQ ID NO: 1969 - RNA, 10 nt, Unknown
  source: /note="Description of Unknown: Exemplary gene or splice site sequence"
gagguauucc

SEQ ID NO: 1970 - RNA, 10 nt, Unknown
  source: /note="Description of Unknown: Exemplary gene or splice site sequence"
gagguauuga

SEQ ID NO: 1971 - RNA, 10 nt, Unknown
  source: /note="Description of Unknown: Exemplary gene or splice site sequence"
gagguauugu

SEQ ID NO: 1972 - RNA, 10 nt, Unknown
  source: /note="Description of Unknown: Exemplary gene or splice site sequence"
gagguauuua

SEQ ID NO: 1973 - RNA, 10 nt, Unknown
  source: /note="Description of Unknown: Exemplary gene or splice site sequence"
gagguauuuc

SEQ ID NO: 1974 - RNA, 10 nt, Unknown
  source: /note="Description of Unknown: Exemplary gene or splice site sequence"
gagguauuug

SEQ ID NO: 1975 - RNA, 10 nt, Unknown
  source: /note="Description of Unknown: Exemplary gene or splice site sequence"
gagguauuuu

SEQ ID NO: 1976 - RNA, 10 nt, Unknown
  source: /note="Description of Unknown: Exemplary gene or splice site sequence"
gaggucaaca

SEQ ID NO: 1977 - RNA, 10 nt, Unknown
  source: /note="Description of Unknown: Exemplary gene or splice site sequence"
gaggucaagg

SEQ ID NO: 1978 - RNA, 10 nt, Unknown
  source: /note="Description of Unknown: Exemplary gene or splice site sequence"
gaggucaaug

SEQ ID NO: 1979 - RNA, 10 nt, Unknown
  source: /note="Description of Unknown: Exemplary gene or splice site sequence"
gaggucacug

SEQ ID NO: 1980 - RNA, 10 nt, Unknown
  source: /note="Description of Unknown: Exemplary gene or splice site sequence"
gaggucagaa

SEQ ID NO: 1981 - RNA, 10 nt, Unknown
  source: /note="Description of Unknown: Exemplary gene or splice site sequence"
gaggucagag

SEQ ID NO: 1982 - RNA, 10 nt, Unknown
  source: /note="Description of Unknown: Exemplary gene or splice site sequence"
gaggucagcu

SEQ ID NO: 1983 - RNA, 10 nt, Unknown
  source: /note="Description of Unknown: Exemplary gene or splice site sequence"
gaggucagga

SEQ ID NO: 1984 - RNA, 10 nt, Unknown
  source: /note="Description of Unknown: Exemplary gene or splice site sequence"
gaggucaggc

SEQ ID NO: 1985 - RNA, 10 nt, Unknown
  source: /note="Description of Unknown: Exemplary gene or splice site sequence"
gaggucaggg

SEQ ID NO: 1986 - RNA, 10 nt, Unknown
  source: /note="Description of Unknown: Exemplary gene or splice site sequence"
gaggucaggu

SEQ ID NO: 1987 - RNA, 10 nt, Unknown
  source: /note="Description of Unknown: Exemplary gene or splice site sequence"
gaggucagua

SEQ ID NO: 1988 - RNA, 10 nt, Unknown
  source: /note="Description of Unknown: Exemplary gene or splice site sequence"
gaggucauau

SEQ ID NO: 1989 - RNA, 10 nt, Unknown
  source: /note="Description of Unknown: Exemplary gene or splice site sequence"
gaggucaugu

SEQ ID NO: 1990 - RNA, 10 nt, Unknown
  source: /note="Description of Unknown: Exemplary gene or splice site sequence"
gaggucauuu

SEQ ID NO: 1991 - RNA, 10 nt, Unknown
  source: /note="Description of Unknown: Exemplary gene or splice site sequence"
gagguccaua

SEQ ID NO: 1992 - RNA, 10 nt, Unknown
  source: /note="Description of Unknown: Exemplary gene or splice site sequence"
gagguccauc

SEQ ID NO: 1993 - RNA, 10 nt, Unknown
  source: /note="Description of Unknown: Exemplary gene or splice site sequence"
gagguccggg

SEQ ID NO: 1994 - RNA, 10 nt, Unknown
  source: /note="Description of Unknown: Exemplary gene or splice site sequence"
gagguccggu

SEQ ID NO: 1995 - RNA, 10 nt, Unknown
  source: /note="Description of Unknown: Exemplary gene or splice site sequence"
gagguccuug

SEQ ID NO: 1996 - RNA, 10 nt, Unknown
  source: /note="Description of Unknown: Exemplary gene or splice site sequence"
gaggucgggg

SEQ ID NO: 1997 - RNA, 10 nt, Unknown
  source: /note="Description of Unknown: Exemplary gene or splice site sequence"
gaggucucgu

SEQ ID NO: 1998 - RNA, 10 nt, Unknown
  source: /note="Description of Unknown: Exemplary gene or splice site sequence"
gaggucugag

SEQ ID NO: 1999 - RNA, 10 nt, Unknown
  source: /note="Description of Unknown: Exemplary gene or splice site sequence"
gaggucuggu

SEQ ID NO: 2000 - RNA, 10 nt, Unknown
  source: /note="Description of Unknown: Exemplary gene or splice site sequence"
gaggucuguc

SEQ ID NO: 2001 - RNA, 10 nt, Unknown
  source: /note="Description of Unknown: Exemplary gene or splice site sequence"
gaggucuguu

SEQ ID NO: 2002 - RNA, 10 nt, Unknown
  source: /note="Description of Unknown: Exemplary gene or splice site sequence"
gaggucuuuu

SEQ ID NO: 2003 - RNA, 10 nt, Unknown
  source: /note="Description of Unknown: Exemplary gene or splice site sequence"
gaggugaaaa

SEQ ID NO: 2004 - RNA, 10 nt, Unknown
  source: /note="Description of Unknown: Exemplary gene or splice site sequence"
gaggugaaau

SEQ ID NO: 2005 - RNA, 10 nt, Unknown
  source: /note="Description of Unknown: Exemplary gene or splice site sequence"
gaggugaaca

SEQ ID NO: 2006 - RNA, 10 nt, Unknown
  source: /note="Description of Unknown: Exemplary gene or splice site sequence"
gaggugaagg

SEQ ID NO: 2007 - RNA, 10 nt, Unknown
  source: /note="Description of Unknown: Exemplary gene or splice site sequence"
gaggugaaua

SEQ ID NO: 2008 - RNA, 10 nt, Unknown
  source: /note="Description of Unknown: Exemplary gene or splice site sequence"
gaggugaauu

SEQ ID NO: 2009 - RNA, 10 nt, Unknown
  source: /note="Description of Unknown: Exemplary gene or splice site sequence"
gaggugacau

SEQ ID NO: 2010 - RNA, 10 nt, Unknown
  source: /note="Description of Unknown: Exemplary gene or splice site sequence"
gaggugacca

SEQ ID NO: 2011 - RNA, 10 nt, Unknown
  source: /note="Description of Unknown: Exemplary gene or splice site sequence"
gaggugaccu

SEQ ID NO: 2012 - RNA, 10 nt, Unknown
  source: /note="Description of Unknown: Exemplary gene or splice site sequence"
gaggugacua

SEQ ID NO: 2013 - RNA, 10 nt, Unknown
  source: /note="Description of Unknown: Exemplary gene or splice site sequence"
gaggugacuu

SEQ ID NO: 2014 - RNA, 10 nt, Unknown
  source: /note="Description of Unknown: Exemplary gene or splice site sequence"
gaggugagaa

SEQ ID NO: 2015 - RNA, 10 nt, Unknown
  source: /note="Description of Unknown: Exemplary gene or splice site sequence"
gaggugagac

SEQ ID NO: 2016 - RNA, 10 nt, Unknown
  source: /note="Description of Unknown: Exemplary gene or splice site sequence"
gaggugagag

SEQ ID NO: 2017 - RNA, 10 nt, Unknown
  source: /note="Description of Unknown: Exemplary gene or splice site sequence"
gaggugagau

SEQ ID NO: 2018 - RNA, 10 nt, Unknown
  source: /note="Description of Unknown: Exemplary gene or splice site sequence"
gaggugagca

SEQ ID NO: 2019 - RNA, 10 nt, Unknown
  source: /note="Description of Unknown: Exemplary gene or splice site sequence"
gaggugagcc

SEQ ID NO: 2020 - RNA, 10 nt, Unknown
  source: /note="Description of Unknown: Exemplary gene or splice site sequence"
gaggugagcg

SEQ ID NO: 2021 - RNA, 10 nt, Unknown
  source: /note="Description of Unknown: Exemplary gene or splice site sequence"
gaggugagcu

SEQ ID NO: 2022 - RNA, 10 nt, Unknown
  source: /note="Description of Unknown: Exemplary gene or splice site sequence"
gaggugagga

SEQ ID NO: 2023 - RNA, 10 nt, Unknown
  source: /note="Description of Unknown: Exemplary gene or splice site sequence"
gaggugaggc

SEQ ID NO: 2024 - RNA, 10 nt, Unknown
  source: /note="Description of Unknown: Exemplary gene or splice site sequence"
gaggugaggg

SEQ ID NO: 2025 - RNA, 10 nt, Unknown
  source: /note="Description of Unknown: Exemplary gene or splice site sequence"
gaggugagua

SEQ ID NO: 2026 - RNA, 10 nt, Unknown
  source: /note="Description of Unknown: Exemplary gene or splice site sequence"
gaggugagug

SEQ ID NO: 2027 - RNA, 10 nt, Unknown
  source: /note="Description of Unknown: Exemplary gene or splice site sequence"
gaggugaguu

SEQ ID NO: 2028 - RNA, 10 nt, Unknown
  source: /note="Description of Unknown: Exemplary gene or splice site sequence"
gaggugauau

SEQ ID NO: 2029 - RNA, 10 nt, Unknown
  source: /note="Description of Unknown: Exemplary gene or splice site sequence"
gaggugaucc

SEQ ID NO: 2030 - RNA, 10 nt, Unknown
  source: /note="Description of Unknown: Exemplary gene or splice site sequence"
gaggugaucu

SEQ ID NO: 2031 - RNA, 10 nt, Unknown
  source: /note="Description of Unknown: Exemplary gene or splice site sequence"
gaggugauga

SEQ ID NO: 2032 - RNA, 10 nt, Unknown
  source: /note="Description of Unknown: Exemplary gene or splice site sequence"
gaggugaugg

SEQ ID NO: 2033 - RNA, 10 nt, Unknown
  source: /note="Description of Unknown: Exemplary gene or splice site sequence"
gaggugaugu

SEQ ID NO: 2034 - RNA, 10 nt, Unknown
  source: /note="Description of Unknown: Exemplary gene or splice site sequence"
gaggugauuc

SEQ ID NO: 2035 - RNA, 10 nt, Unknown
  source: /note="Description of Unknown: Exemplary gene or splice site sequence"
gaggugcaca

SEQ ID NO: 2036 - RNA, 10 nt, Unknown
  source: /note="Description of Unknown: Exemplary gene or splice site sequence"
gaggugcaga

SEQ ID NO: 2037 - RNA, 10 nt, Unknown
  source: /note="Description of Unknown: Exemplary gene or splice site sequence"
gaggugcagc

SEQ ID NO: 2038 - RNA, 10 nt, Unknown
  source: /note="Description of Unknown: Exemplary gene or splice site sequence"
gaggugcagg

SEQ ID NO: 2039 - RNA, 10 nt, Unknown
  source: /note="Description of Unknown: Exemplary gene or splice site sequence"
gaggugccag

SEQ ID NO: 2040 - RNA, 10 nt, Unknown
  source: /note="Description of Unknown: Exemplary gene or splice site sequence"
gaggugccca

SEQ ID NO: 2041 - RNA, 10 nt, Unknown
  source: /note="Description of Unknown: Exemplary gene or splice site sequence"
gaggugccuu

SEQ ID NO: 2042 - RNA, 10 nt, Unknown
  source: /note="Description of Unknown: Exemplary gene or splice site sequence"
gaggugcggg

SEQ ID NO: 2043 - RNA, 10 nt, Unknown
  source: /note="Description of Unknown: Exemplary gene or splice site sequence"
gaggugcgug

SEQ ID NO: 2044 - RNA, 10 nt, Unknown
  source: /note="Description of Unknown: Exemplary gene or splice site sequence"
gaggugcucc

SEQ ID NO: 2045 - RNA, 10 nt, Unknown
  source: /note="Description of Unknown: Exemplary gene or splice site sequence"
gaggugcugg

SEQ ID NO: 2046 - RNA, 10 nt, Unknown
  source: /note="Description of Unknown: Exemplary gene or splice site sequence"
gaggugcuua

SEQ ID NO: 2047 - RNA, 10 nt, Unknown
  source: /note="Description of Unknown: Exemplary gene or splice site sequence"
gaggugcuug

SEQ ID NO: 2048 - RNA, 10 nt, Unknown
  source: /note="Description of Unknown: Exemplary gene or splice site sequence"
gagguggaaa

SEQ ID NO: 2049 - RNA, 10 nt, Unknown
  source: /note="Description of Unknown: Exemplary gene or splice site sequence"
gagguggaau

SEQ ID NO: 2050 - RNA, 10 nt, Unknown
  source: /note="Description of Unknown: Exemplary gene or splice site sequence"
gagguggacc

SEQ ID NO: 2051 - RNA, 10 nt, Unknown
  source: /note="Description of Unknown: Exemplary gene or splice site sequence"
gagguggacg

SEQ ID NO: 2052 - RNA, 10 nt, Unknown
  source: /note="Description of Unknown: Exemplary gene or splice site sequence"
gagguggagg

SEQ ID NO: 2053 - RNA, 10 nt, Unknown
  source: /note="Description of Unknown: Exemplary gene or splice site sequence"
gagguggcug

SEQ ID NO: 2054 - RNA, 10 nt, Unknown
  source: /note="Description of Unknown: Exemplary gene or splice site sequence"
gaggugggaa

SEQ ID NO: 2055 - RNA, 10 nt, Unknown
  source: /note="Description of Unknown: Exemplary gene or splice site sequence"
gaggugggag

SEQ ID NO: 2056 - RNA, 10 nt, Unknown
  source: /note="Description of Unknown: Exemplary gene or splice site sequence"
gaggugggau

SEQ ID NO: 2057 - RNA, 10 nt, Unknown
  source: /note="Description of Unknown: Exemplary gene or splice site sequence"
gaggugggca

SEQ ID NO: 2058 - RNA, 10 nt, Unknown
  source: /note="Description of Unknown: Exemplary gene or splice site sequence"
gaggugggcg

SEQ ID NO: 2059 - RNA, 10 nt, Unknown
  source: /note="Description of Unknown: Exemplary gene or splice site sequence"
gaggugggcu

SEQ ID NO: 2060 - RNA, 10 nt, Unknown
  source: /note="Description of Unknown: Exemplary gene or splice site sequence"
gaggugggga

SEQ ID NO: 2061 - RNA, 10 nt, Unknown
  source: /note="Description of Unknown: Exemplary gene or splice site sequence"
gagguggggc

SEQ ID NO: 2062 - RNA, 10 nt, Unknown
  source: /note="Description of Unknown: Exemplary gene or splice site sequence"
gagguggggg

SEQ ID NO: 2063 - RNA, 10 nt, Unknown
  source: /note="Description of Unknown: Exemplary gene or splice site sequence"
gaggugggua

SEQ ID NO: 2064 - RNA, 10 nt, Unknown
  source: /note="Description of Unknown: Exemplary gene or splice site sequence"
gagguggguc

SEQ ID NO: 2065 - RNA, 10 nt, Unknown
  source: /note="Description of Unknown: Exemplary gene or splice site sequence"
gaggugggug

SEQ ID NO: 2066 - RNA, 10 nt, Unknown
  source: /note="Description of Unknown: Exemplary gene or splice site sequence"
gagguggguu

SEQ ID NO: 2067 - RNA, 10 nt, Unknown
  source: /note="Description of Unknown: Exemplary gene or splice site sequence"
gaggugguau

SEQ ID NO: 2068 - RNA, 10 nt, Unknown
  source: /note="Description of Unknown: Exemplary gene or splice site sequence"
gaggugguuc

SEQ ID NO: 2069 - RNA, 10 nt, Unknown
  source: /note="Description of Unknown: Exemplary gene or splice site sequence"
gaggugucau

SEQ ID NO: 2070 - RNA, 10 nt, Unknown
  source: /note="Description of Unknown: Exemplary gene or splice site sequence"
gaggugugag

SEQ ID NO: 2071 - RNA, 10 nt, Unknown
  source: /note="Description of Unknown: Exemplary gene or splice site sequence"
gaggugugau

SEQ ID NO: 2072 - RNA, 10 nt, Unknown
  source: /note="Description of Unknown: Exemplary gene or splice site sequence"
gaggugugca

SEQ ID NO: 2073 - RNA, 10 nt, Unknown
  source: /note="Description of Unknown: Exemplary gene or splice site sequence"
gaggugugcu

SEQ ID NO: 2074 - RNA, 10 nt, Unknown
  source: /note="Description of Unknown: Exemplary gene or splice site sequence"
gaggugugga

SEQ ID NO: 2075 - RNA, 10 nt, Unknown
  source: /note="Description of Unknown: Exemplary gene or splice site sequence"
gagguguggg

SEQ ID NO: 2076 - RNA, 10 nt, Unknown
  source: /note="Description of Unknown: Exemplary gene or splice site sequence"
gagguguggu

SEQ ID NO: 2077 - RNA, 10 nt, Unknown
  source: /note="Description of Unknown: Exemplary gene or splice site sequence"
gaggugugua

SEQ ID NO: 2078 - RNA, 10 nt, Unknown
  source: /note="Description of Unknown: Exemplary gene or splice site sequence"
gaggugugug

SEQ ID NO: 2079 - RNA, 10 nt, Unknown
  source: /note="Description of Unknown: Exemplary gene or splice site sequence"
gagguuaaau

SEQ ID NO: 2080 - RNA, 10 nt, Unknown
  source: /note="Description of Unknown: Exemplary gene or splice site sequence"
gagguuaaga

SEQ ID NO: 2081 - RNA, 10 nt, Unknown
  source: /note="Description of Unknown: Exemplary gene or splice site sequence"
gagguuaaua

SEQ ID NO: 2082 - RNA, 10 nt, Unknown
  source: /note="Description of Unknown: Exemplary gene or splice site sequence"
gagguuaccg

SEQ ID NO: 2083 - RNA, 10 nt, Unknown
  source: /note="Description of Unknown: Exemplary gene or splice site sequence"
gagguuagaa

SEQ ID NO: 2084 - RNA, 10 nt, Unknown
  source: /note="Description of Unknown: Exemplary gene or splice site sequence"
gagguuagac

SEQ ID NO: 2085 - RNA, 10 nt, Unknown
  source: /note="Description of Unknown: Exemplary gene or splice site sequence"
gagguuagag

SEQ ID NO: 2086 - RNA, 10 nt, Unknown
  source: /note="Description of Unknown: Exemplary gene or splice site sequence"
gagguuaggu

SEQ ID NO: 2087 - RNA, 10 nt, Unknown
  source: /note="Description of Unknown: Exemplary gene or splice site sequence"
gagguuagua

SEQ ID NO: 2088 - RNA, 10 nt, Unknown
  source: /note="Description of Unknown: Exemplary gene or splice site sequence"
gagguuaguc

SEQ ID NO: 2089 - RNA, 10 nt, Unknown
  source: /note="Description of Unknown: Exemplary gene or splice site sequence"
gagguuagug

SEQ ID NO: 2090 - RNA, 10 nt, Unknown
  source: /note="Description of Unknown: Exemplary gene or splice site sequence"
gagguuaguu

SEQ ID NO: 2091 - RNA, 10 nt, Unknown
  source: /note="Description of Unknown: Exemplary gene or splice site sequence"
gagguuaugu

SEQ ID NO: 2092 - RNA, 10 nt, Unknown
  source: /note="Description of Unknown: Exemplary gene or splice site sequence"
gagguuauuc

SEQ ID NO: 2093 - RNA, 10 nt, Unknown
  source: /note="Description of Unknown: Exemplary gene or splice site sequence"
gagguucaaa

SEQ ID NO: 2094 - RNA, 10 nt, Unknown
  source: /note="Description of Unknown: Exemplary gene or splice site sequence"
gagguucaua

SEQ ID NO: 2095 - RNA, 10 nt, Unknown
  source: /note="Description of Unknown: Exemplary gene or splice site sequence"
gagguucuga

SEQ ID NO: 2096 - RNA, 10 nt, Unknown
  source: /note="Description of Unknown: Exemplary gene or splice site sequence"
gagguugaag

SEQ ID NO: 2097 - RNA, 10 nt, Unknown
  source: /note="Description of Unknown: Exemplary gene or splice site sequence"
gagguugcag

SEQ ID NO: 2098 - RNA, 10 nt, Unknown
  source: /note="Description of Unknown: Exemplary gene or splice site sequence"
gagguugcug

SEQ ID NO: 2099 - RNA, 10 nt, Unknown
  source: /note="Description of Unknown: Exemplary gene or splice site sequence"
gagguuggaa

SEQ ID NO: 2100 - RNA, 10 nt, Unknown
  source: /note="Description of Unknown: Exemplary gene or splice site sequence"
gagguuggag

SEQ ID NO: 2101 - RNA, 10 nt, Unknown
  source: /note="Description of Unknown: Exemplary gene or splice site sequence"
gagguuggau

SEQ ID NO: 2102 - RNA, 10 nt, Unknown
  source: /note="Description of Unknown: Exemplary gene or splice site sequence"
gagguuggua

SEQ ID NO: 2103 - RNA, 10 nt, Unknown
  source: /note="Description of Unknown: Exemplary gene or splice site sequence"
gagguugguc

SEQ ID NO: 2104 - RNA, 10 nt, Unknown
  source: /note="Description of Unknown: Exemplary gene or splice site sequence"
gagguugguu

SEQ ID NO: 2105 - RNA, 10 nt, Unknown
  source: /note="Description of Unknown: Exemplary gene or splice site sequence"
gagguuguag

SEQ ID NO: 2106 - RNA, 10 nt, Unknown
  source: /note="Description of Unknown: Exemplary gene or splice site sequence"
gagguuucug

SEQ ID NO: 2107 - RNA, 10 nt, Unknown
  source: /note="Description of Unknown: Exemplary gene or splice site sequence"
gagguuugag

SEQ ID NO: 2108 - RNA, 10 nt, Unknown
  source: /note="Description of Unknown: Exemplary gene or splice site sequence"
gagguuugga

SEQ ID NO: 2109 - RNA, 10 nt, Unknown
  source: /note="Description of Unknown: Exemplary gene or splice site sequence"
gagguuuggg

SEQ ID NO: 2110 - RNA, 10 nt, Unknown
  source: /note="Description of Unknown: Exemplary gene or splice site sequence"
gagguuugua

SEQ ID NO: 2111 - RNA, 10 nt, Unknown
  source: /note="Description of Unknown: Exemplary gene or splice site sequence"
gagguuuguu

SEQ ID NO: 2112 - RNA, 10 nt, Unknown
  source: /note="Description of Unknown: Exemplary gene or splice site sequence"
gagguuuuca

SEQ ID NO: 2113 - RNA, 10 nt, Unknown
  source: /note="Description of Unknown: Exemplary gene or splice site sequence"
gagguuuuga

SEQ ID NO: 2114 - RNA, 10 nt, Unknown
  source: /note="Description of Unknown: Exemplary gene or splice site sequence"
gagguuuugg

SEQ ID NO: 2115 - RNA, 10 nt, Unknown
  source: /note="Description of Unknown: Exemplary gene or splice site sequence"
gagguuuuua

SEQ ID NO: 2116 - RNA, 10 nt, Unknown
  source: /note="Description of Unknown: Exemplary gene or splice site sequence"
gagguuuuuc

SEQ ID NO: 2117 - RNA, 10 nt, Unknown
  source: /note="Description of Unknown: Exemplary gene or splice site sequence"
gauguaaaau

SEQ ID NO: 2118 - RNA, 10 nt, Unknown
  source: /note="Description of Unknown: Exemplary gene or splice site sequence"
gauguaagca

SEQ ID NO: 2119 - RNA, 10 nt, Unknown
  source: /note="Description of Unknown: Exemplary gene or splice site sequence"
gauguaagcc

SEQ ID NO: 2120 - RNA, 10 nt, Unknown
  source: /note="Description of Unknown: Exemplary gene or splice site sequence"
gauguaaggu

SEQ ID NO: 2121 - RNA, 10 nt, Unknown
  source: /note="Description of Unknown: Exemplary gene or splice site sequence"
gauguaagua

SEQ ID NO: 2122 - RNA, 10 nt, Unknown
  source: /note="Description of Unknown: Exemplary gene or splice site sequence"
gauguaagug

SEQ ID NO: 2123 - RNA, 10 nt, Unknown
  source: /note="Description of Unknown: Exemplary gene or splice site sequence"
gauguaaguu

SEQ ID NO: 2124 - RNA, 10 nt, Unknown
  source: /note="Description of Unknown: Exemplary gene or splice site sequence"
gauguacauc

SEQ ID NO: 2125 - RNA, 10 nt, Unknown
  source: /note="Description of Unknown: Exemplary gene or splice site sequence"
gauguaggua

SEQ ID NO: 2126 - RNA, 10 nt, Unknown
  source: /note="Description of Unknown: Exemplary gene or splice site sequence"
gauguauggc

SEQ ID NO: 2127 - RNA, 10 nt, Unknown
  source: /note="Description of Unknown: Exemplary gene or splice site sequence"
gauguaugua

SEQ ID NO: 2128 - RNA, 10 nt, Unknown
  source: /note="Description of Unknown: Exemplary gene or splice site sequence"
gauguauguu

SEQ ID NO: 2129 - RNA, 10 nt, Unknown
  source: /note="Description of Unknown: Exemplary gene or splice site sequence"
gaugucagug

SEQ ID NO: 2130 - RNA, 10 nt, Unknown
  source: /note="Description of Unknown: Exemplary gene or splice site sequence"
gaugugagag

SEQ ID NO: 2131 - RNA, 10 nt, Unknown
  source: /note="Description of Unknown: Exemplary gene or splice site sequence"
gaugugagcc

SEQ ID NO: 2132 - RNA, 10 nt, Unknown
  source: /note="Description of Unknown: Exemplary gene or splice site sequence"
gaugugagcu

SEQ ID NO: 2133 - RNA, 10 nt, Unknown
  source: /note="Description of Unknown: Exemplary gene or splice site sequence"
gaugugagga

SEQ ID NO: 2134 - RNA, 10 nt, Unknown
  source: /note="Description of Unknown: Exemplary gene or splice site sequence"
gaugugaguc

SEQ ID NO: 2135 - RNA, 10 nt, Unknown
  source: /note="Description of Unknown: Exemplary gene or splice site sequence"
gaugugagug

SEQ ID NO: 2136 - RNA, 10 nt, Unknown
  source: /note="Description of Unknown: Exemplary gene or splice site sequence"
gaugugaguu

SEQ ID NO: 2137 - RNA, 10 nt, Unknown
  source: /note="Description of Unknown: Exemplary gene or splice site sequence"
gaugugggua

SEQ ID NO: 2138 - RNA, 10 nt, Unknown
  source: /note="Description of Unknown: Exemplary gene or splice site sequence"
gaugugggug

SEQ ID NO: 2139 - RNA, 10 nt, Unknown
  source: /note="Description of Unknown: Exemplary gene or splice site sequence"
gauguguguu

SEQ ID NO: 2140 - RNA, 10 nt, Unknown
  source: /note="Description of Unknown: Exemplary gene or splice site sequence"
gauguuagcu

SEQ ID NO: 2141 - RNA, 10 nt, Unknown
  source: /note="Description of Unknown: Exemplary gene or splice site sequence"
gauguucagu

SEQ ID NO: 2142 - RNA, 10 nt, Unknown
  source: /note="Description of Unknown: Exemplary gene or splice site sequence"
gauguucgug

SEQ ID NO: 2143 - RNA, 10 nt, Unknown
  source: /note="Description of Unknown: Exemplary gene or splice site sequence"
gauguuuguu

SEQ ID NO: 2144 - RNA, 10 nt, Unknown
  source: /note="Description of Unknown: Exemplary gene or splice site sequence"
gcaguaaagg

SEQ ID NO: 2145 - RNA, 10 nt, Unknown
  source: /note="Description of Unknown: Exemplary gene or splice site sequence"
gcaguaagaa

SEQ ID NO: 2146 - RNA, 10 nt, Unknown
  source: /note="Description of Unknown: Exemplary gene or splice site sequence"
gcaguaagga

SEQ ID NO: 2147 - RNA, 10 nt, Unknown
  source: /note="Description of Unknown: Exemplary gene or splice site sequence"
gcaguaagua

SEQ ID NO: 2148 - RNA, 10 nt, Unknown
  source: /note="Description of Unknown: Exemplary gene or splice site sequence"
gcaguaaguc

SEQ ID NO: 2149 - RNA, 10 nt, Unknown
  source: /note="Description of Unknown: Exemplary gene or splice site sequence"
gcaguaaguu

SEQ ID NO: 2150 - RNA, 10 nt, Unknown
  source: /note="Description of Unknown: Exemplary gene or splice site sequence"
gcaguagaug

SEQ ID NO: 2151 - RNA, 10 nt, Unknown
  source: /note="Description of Unknown: Exemplary gene or splice site sequence"
gcaguaggua

SEQ ID NO: 2152 - RNA, 10 nt, Unknown
  source: /note="Description of Unknown: Exemplary gene or splice site sequence"
gcaguaugug

SEQ ID NO: 2153 - RNA, 10 nt, Unknown
  source: /note="Description of Unknown: Exemplary gene or splice site sequence"
gcaguauguu

SEQ ID NO: 2154 - RNA, 10 nt, Unknown
  source: /note="Description of Unknown: Exemplary gene or splice site sequence"
gcagucagua

SEQ ID NO: 2155 - RNA, 10 nt, Unknown
  source: /note="Description of Unknown: Exemplary gene or splice site sequence"
gcagucagug

SEQ ID NO: 2156 - RNA, 10 nt, Unknown
  source: /note="Description of Unknown: Exemplary gene or splice site sequence"
gcaguccggu

SEQ ID NO: 2157 - RNA, 10 nt, Unknown
  source: /note="Description of Unknown: Exemplary gene or splice site sequence"
gcagugacuu

SEQ ID NO: 2158 - RNA, 10 nt, Unknown
  source: /note="Description of Unknown: Exemplary gene or splice site sequence"
gcagugagcc

SEQ ID NO: 2159 - RNA, 10 nt, Unknown
  source: /note="Description of Unknown: Exemplary gene or splice site sequence"
gcagugagcg

SEQ ID NO: 2160 - RNA, 10 nt, Unknown
  source: /note="Description of Unknown: Exemplary gene or splice site sequence"
gcagugagcu

SEQ ID NO: 2161 - RNA, 10 nt, Unknown
  source: /note="Description of Unknown: Exemplary gene or splice site sequence"
gcagugagua

SEQ ID NO: 2162 - RNA, 10 nt, Unknown
  source: /note="Description of Unknown: Exemplary gene or splice site sequence"
gcagugagug

SEQ ID NO: 2163 - RNA, 10 nt, Unknown
  source: /note="Description of Unknown: Exemplary gene or splice site sequence"
gcagugaguu

SEQ ID NO: 2164 - RNA, 10 nt, Unknown
  source: /note="Description of Unknown: Exemplary gene or splice site sequence"
gcagugggua

SEQ ID NO: 2165 - RNA, 10 nt, Unknown
  source: /note="Description of Unknown: Exemplary gene or splice site sequence"
gcaguuaagu

SEQ ID NO: 2166 - RNA, 10 nt, Unknown
  source: /note="Description of Unknown: Exemplary gene or splice site sequence"
gcaguugagu

SEQ ID NO: 2167 - RNA, 10 nt, Unknown
  source: /note="Description of Unknown: Exemplary gene or splice site sequence"
gccguaaguc

SEQ ID NO: 2168 - RNA, 10 nt, Unknown
  source: /note="Description of Unknown: Exemplary gene or splice site sequence"
gccgugagua

SEQ ID NO: 2169 - RNA, 10 nt, Unknown
  source: /note="Description of Unknown: Exemplary gene or splice site sequence"
gcgguaaagc

SEQ ID NO: 2170 - RNA, 10 nt, Unknown
  source: /note="Description of Unknown: Exemplary gene or splice site sequence"
gcgguaaaua

SEQ ID NO: 2171 - RNA, 10 nt, Unknown
  source: /note="Description of Unknown: Exemplary gene or splice site sequence"
gcgguaagcu

SEQ ID NO: 2172 - RNA, 10 nt, Unknown
  source: /note="Description of Unknown: Exemplary gene or splice site sequence"
gcgguaaggg

SEQ ID NO: 2173 - RNA, 10 nt, Unknown
  source: /note="Description of Unknown: Exemplary gene or splice site sequence"
gcgguaagug

SEQ ID NO: 2174 - RNA, 10 nt, Unknown
  source: /note="Description of Unknown: Exemplary gene or splice site sequence"
gcgguaauca

SEQ ID NO: 2175 - RNA, 10 nt, Unknown
  source: /note="Description of Unknown: Exemplary gene or splice site sequence"
gcgguacgua

SEQ ID NO: 2176 - RNA, 10 nt, Unknown
  source: /note="Description of Unknown: Exemplary gene or splice site sequence"
gcgguacuug

SEQ ID NO: 2177 - RNA, 10 nt, Unknown
  source: /note="Description of Unknown: Exemplary gene or splice site sequence"
gcgguagggu

SEQ ID NO: 2178 - RNA, 10 nt, Unknown
  source: /note="Description of Unknown: Exemplary gene or splice site sequence"
gcgguagugu

SEQ ID NO: 2179 - RNA, 10 nt, Unknown
  source: /note="Description of Unknown: Exemplary gene or splice site sequence"
gcggugagca

SEQ ID NO: 2180 - RNA, 10 nt, Unknown
  source: /note="Description of Unknown: Exemplary gene or splice site sequence"
gcggugagcu

SEQ ID NO: 2181 - RNA, 10 nt, Unknown
  source: /note="Description of Unknown: Exemplary gene or splice site sequence"
gcggugaguu

SEQ ID NO: 2182 - RNA, 10 nt, Unknown
  source: /note="Description of Unknown: Exemplary gene or splice site sequence"
gcgguggcuc

SEQ ID NO: 2183 - RNA, 10 nt, Unknown
  source: /note="Description of Unknown: Exemplary gene or splice site sequence"
gcggugugca

SEQ ID NO: 2184 - RNA, 10 nt, Unknown
  source: /note="Description of Unknown: Exemplary gene or splice site sequence"
gcgguguguu

SEQ ID NO: 2185 - RNA, 10 nt, Unknown
  source: /note="Description of Unknown: Exemplary gene or splice site sequence"
gcgguuaagu

SEQ ID NO: 2186 - RNA, 10 nt, Unknown
  source: /note="Description of Unknown: Exemplary gene or splice site sequence"
gcgguuugca

SEQ ID NO: 2187 - RNA, 10 nt, Unknown
  source: /note="Description of Unknown: Exemplary gene or splice site sequence"
gcugcuguaa

SEQ ID NO: 2188 - RNA, 10 nt, Unknown
  source: /note="Description of Unknown: Exemplary gene or splice site sequence"
gcuguaaaua

SEQ ID NO: 2189 - RNA, 10 nt, Unknown
  source: /note="Description of Unknown: Exemplary gene or splice site sequence"
gcuguaagac

SEQ ID NO: 2190 - RNA, 10 nt, Unknown
  source: /note="Description of Unknown: Exemplary gene or splice site sequence"
gcuguaagag

SEQ ID NO: 2191 - RNA, 10 nt, Unknown
  source: /note="Description of Unknown: Exemplary gene or splice site sequence"
gcuguaagca

SEQ ID NO: 2192 - RNA, 10 nt, Unknown
  source: /note="Description of Unknown: Exemplary gene or splice site sequence"
gcuguaagga

SEQ ID NO: 2193 - RNA, 10 nt, Unknown
  source: /note="Description of Unknown: Exemplary gene or splice site sequence"
gcuguaagua

SEQ ID NO: 2194 - RNA, 10 nt, Unknown
  source: /note="Description of Unknown: Exemplary gene or splice site sequence"
gcuguaaguc

SEQ ID NO: 2195 - RNA, 10 nt, Unknown
  source: /note="Description of Unknown: Exemplary gene or splice site sequence"
gcuguaagug

SEQ ID NO: 2196 - RNA, 10 nt, Unknown
  source: /note="Description of Unknown: Exemplary gene or splice site sequence"
gcuguaaguu

SEQ ID NO: 2197 - RNA, 10 nt, Unknown
  source: /note="Description of Unknown: Exemplary gene or splice site sequence"
gcuguaggug

SEQ ID NO: 2198 - RNA, 10 nt, Unknown
  source: /note="Description of Unknown: Exemplary gene or splice site sequence"
gcuguauggu

SEQ ID NO: 2199 - RNA, 10 nt, Unknown
  source: /note="Description of Unknown: Exemplary gene or splice site sequence"
gcugucagug

SEQ ID NO: 2200 - RNA, 10 nt, Unknown
  source: /note="Description of Unknown: Exemplary gene or splice site sequence"
gcuguccuug

SEQ ID NO: 2201 - RNA, 10 nt, Unknown
  source: /note="Description of Unknown: Exemplary gene or splice site sequence"
gcugugagaa

SEQ ID NO: 2202 - RNA, 10 nt, Unknown
  source: /note="Description of Unknown: Exemplary gene or splice site sequence"
gcugugagcc

SEQ ID NO: 2203 - RNA, 10 nt, Unknown
  source: /note="Description of Unknown: Exemplary gene or splice site sequence"
gcugugagga

SEQ ID NO: 2204 - RNA, 10 nt, Unknown
  source: /note="Description of Unknown: Exemplary gene or splice site sequence"
gcugugagua

SEQ ID NO: 2205 - RNA, 10 nt, Unknown
  source: /note="Description of Unknown: Exemplary gene or splice site sequence"
gcugugaguc

SEQ ID NO: 2206 - RNA, 10 nt, Unknown
  source: /note="Description of Unknown: Exemplary gene or splice site sequence"
gcugugagug

SEQ ID NO: 2207 - RNA, 10 nt, Unknown
  source: /note="Description of Unknown: Exemplary gene or splice site sequence"
gcugugaguu

SEQ ID NO: 2208 - RNA, 10 nt, Unknown
  source: /note="Description of Unknown: Exemplary gene or splice site sequence"
gcuguggguu

SEQ ID NO: 2209 - RNA, 10 nt, Unknown
  source: /note="Description of Unknown: Exemplary gene or splice site sequence"
ggaguaagag

SEQ ID NO: 2210 - RNA, 10 nt, Unknown
  source: /note="Description of Unknown: Exemplary gene or splice site sequence"
ggaguaagca

SEQ ID NO: 2211 - RNA, 10 nt, Unknown
  source: /note="Description of Unknown: Exemplary gene or splice site sequence"
ggaguaagcc

SEQ ID NO: 2212 - RNA, 10 nt, Unknown
  source: /note="Description of Unknown: Exemplary gene or splice site sequence"
ggaguaagcu

SEQ ID NO: 2213 - RNA, 10 nt, Unknown
  source: /note="Description of Unknown: Exemplary gene or splice site sequence"
ggaguaagga

SEQ ID NO: 2214 - RNA, 10 nt, Unknown
  source: /note="Description of Unknown: Exemplary gene or splice site sequence"
ggaguaagug

SEQ ID NO: 2215 - RNA, 10 nt, Unknown
  source: /note="Description of Unknown: Exemplary gene or splice site sequence"
ggaguaaguu

SEQ ID NO: 2216 - RNA, 10 nt, Unknown
  source: /note="Description of Unknown: Exemplary gene or splice site sequence"
ggaguaauuu

SEQ ID NO: 2217 - RNA, 10 nt, Unknown
  source: /note="Description of Unknown: Exemplary gene or splice site sequence"
ggaguacugu

SEQ ID NO: 2218 - RNA, 10 nt, Unknown
  source: /note="Description of Unknown: Exemplary gene or splice site sequence"
ggaguaggaa

SEQ ID NO: 2219 - RNA, 10 nt, Unknown
  source: /note="Description of Unknown: Exemplary gene or splice site sequence"
ggaguaggua

SEQ ID NO: 2220 - RNA, 10 nt, Unknown
  source: /note="Description of Unknown: Exemplary gene or splice site sequence"
ggaguagguu

SEQ ID NO: 2221 - RNA, 10 nt, Unknown
  source: /note="Description of Unknown: Exemplary gene or splice site sequence"
ggaguaguau

SEQ ID NO: 2222 - RNA, 10 nt, Unknown
  source: /note="Description of Unknown: Exemplary gene or splice site sequence"
ggaguaugac

SEQ ID NO: 2223 - RNA, 10 nt, Unknown
  source: /note="Description of Unknown: Exemplary gene or splice site sequence"
ggaguauggu

SEQ ID NO: 2224 - RNA, 10 nt, Unknown
  source: /note="Description of Unknown: Exemplary gene or splice site sequence"
ggagucaagu

SEQ ID NO: 2225 - RNA, 10 nt, Unknown
  source: /note="Description of Unknown: Exemplary gene or splice site sequence"
ggagugaggg

SEQ ID NO: 2226 - RNA, 10 nt, Unknown
  source: /note="Description of Unknown: Exemplary gene or splice site sequence"
ggagugagua

SEQ ID NO: 2227 - RNA, 10 nt, Unknown
  source: /note="Description of Unknown: Exemplary gene or splice site sequence"
ggagugaguc

SEQ ID NO: 2228 - RNA, 10 nt, Unknown
  source: /note="Description of Unknown: Exemplary gene or splice site sequence"
ggagugagug

SEQ ID NO: 2229 - RNA, 10 nt, Unknown
  source: /note="Description of Unknown: Exemplary gene or splice site sequence"
ggagugaguu

SEQ ID NO: 2230 - RNA, 10 nt, Unknown
  source: /note="Description of Unknown: Exemplary gene or splice site sequence"
ggagugcuuu

SEQ ID NO: 2231 - RNA, 10 nt, Unknown
  source: /note="Description of Unknown: Exemplary gene or splice site sequence"
ggagugggca

SEQ ID NO: 2232 - RNA, 10 nt, Unknown
  source: /note="Description of Unknown: Exemplary gene or splice site sequence"
ggagugggug

SEQ ID NO: 2233 - RNA, 10 nt, Unknown
  source: /note="Description of Unknown: Exemplary gene or splice site sequence"
ggaguuaagg

SEQ ID NO: 2234 - RNA, 10 nt, Unknown
  source: /note="Description of Unknown: Exemplary gene or splice site sequence"
ggaguugaga

SEQ ID NO: 2235 - RNA, 10 nt, Unknown
  source: /note="Description of Unknown: Exemplary gene or splice site sequence"
ggcguaagcc

SEQ ID NO: 2236 - RNA, 10 nt, Unknown
  source: /note="Description of Unknown: Exemplary gene or splice site sequence"
ggcguaggua

SEQ ID NO: 2237 - RNA, 10 nt, Unknown
  source: /note="Description of Unknown: Exemplary gene or splice site sequence"
ggcguaggug

SEQ ID NO: 2238 - RNA, 10 nt, Unknown
  source: /note="Description of Unknown: Exemplary gene or splice site sequence"
ggcgugagcc

SEQ ID NO: 2239 - RNA, 10 nt, Unknown
  source: /note="Description of Unknown: Exemplary gene or splice site sequence"
ggcgugaguc

SEQ ID NO: 2240 - RNA, 10 nt, Unknown
  source: /note="Description of Unknown: Exemplary gene or splice site sequence"
gggguaaaca

SEQ ID NO: 2241 - RNA, 10 nt, Unknown
  source: /note="Description of Unknown: Exemplary gene or splice site sequence"
gggguaaacc

SEQ ID NO: 2242 - RNA, 10 nt, Unknown
  source: /note="Description of Unknown: Exemplary gene or splice site sequence"
gggguaaacu

SEQ ID NO: 2243 - RNA, 10 nt, Unknown
  source: /note="Description of Unknown: Exemplary gene or splice site sequence"
gggguaagaa

SEQ ID NO: 2244 - RNA, 10 nt, Unknown
  source: /note="Description of Unknown: Exemplary gene or splice site sequence"
gggguaagag

SEQ ID NO: 2245 - RNA, 10 nt, Unknown
  source: /note="Description of Unknown: Exemplary gene or splice site sequence"
gggguaagau

SEQ ID NO: 2246 - RNA, 10 nt, Unknown
  source: /note="Description of Unknown: Exemplary gene or splice site sequence"
gggguaagca

SEQ ID NO: 2247 - RNA, 10 nt, Unknown
  source: /note="Description of Unknown: Exemplary gene or splice site sequence"
gggguaagcc

SEQ ID NO: 2248 - RNA, 10 nt, Unknown
  source: /note="Description of Unknown: Exemplary gene or splice site sequence"
gggguaagcu

SEQ ID NO: 2249 - RNA, 10 nt, Unknown
  source: /note="Description of Unknown: Exemplary gene or splice site sequence"
gggguaagga

SEQ ID NO: 2250 - RNA, 10 nt, Unknown
  source: /note="Description of Unknown: Exemplary gene or splice site sequence"
gggguaaggg

SEQ ID NO: 2251 - RNA, 10 nt, Unknown
  source: /note="Description of Unknown: Exemplary gene or splice site sequence"
gggguaagua

SEQ ID NO: 2252 - RNA, 10 nt, Unknown
  source: /note="Description of Unknown: Exemplary gene or splice site sequence"
gggguaagug

SEQ ID NO: 2253 - RNA, 10 nt, Unknown
  source: /note="Description of Unknown: Exemplary gene or splice site sequence"
gggguaaguu

SEQ ID NO: 2254 - RNA, 10 nt, Unknown
  source: /note="Description of Unknown: Exemplary gene or splice site sequence"
gggguagaca

SEQ ID NO: 2255 - RNA, 10 nt, Unknown
  source: /note="Description of Unknown: Exemplary gene or splice site sequence"
gggguaggag

SEQ ID NO: 2256 - RNA, 10 nt, Unknown
  source: /note="Description of Unknown: Exemplary gene or splice site sequence"
gggguaggcc

SEQ ID NO: 2257 - RNA, 10 nt, Unknown
  source: /note="Description of Unknown: Exemplary gene or splice site sequence"
gggguaggga

SEQ ID NO: 2258 - RNA, 10 nt, Unknown
  source: /note="Description of Unknown: Exemplary gene or splice site sequence"
gggguaggua

SEQ ID NO: 2259 - RNA, 10 nt, Unknown
  source: /note="Description of Unknown: Exemplary gene or splice site sequence"
gggguaggug

SEQ ID NO: 2260 - RNA, 10 nt, Unknown
  source: /note="Description of Unknown: Exemplary gene or splice site sequence"
gggguagguu

SEQ ID NO: 2261 - RNA, 10 nt, Unknown
  source: /note="Description of Unknown: Exemplary gene or splice site sequence"
gggguagugc

SEQ ID NO: 2262 - RNA, 10 nt, Unknown
  source: /note="Description of Unknown: Exemplary gene or splice site sequence"
gggguaucug

SEQ ID NO: 2263 - RNA, 10 nt, Unknown
  source: /note="Description of Unknown: Exemplary gene or splice site sequence"
gggguaugac

SEQ ID NO: 2264 - RNA, 10 nt, Unknown
  source: /note="Description of Unknown: Exemplary gene or splice site sequence"
gggguaugga

SEQ ID NO: 2265 - RNA, 10 nt, Unknown
  source: /note="Description of Unknown: Exemplary gene or splice site sequence"
gggguaugua

SEQ ID NO: 2266 - RNA, 10 nt, Unknown
  source: /note="Description of Unknown: Exemplary gene or splice site sequence"
gggguauguc

SEQ ID NO: 2267 - RNA, 10 nt, Unknown
  source: /note="Description of Unknown: Exemplary gene or splice site sequence"
gggguaugug

SEQ ID NO: 2268 - RNA, 10 nt, Unknown
  source: /note="Description of Unknown: Exemplary gene or splice site sequence"
gggguauguu

SEQ ID NO: 2269 - RNA, 10 nt, Unknown
  source: /note="Description of Unknown: Exemplary gene or splice site sequence"
ggggucagua

SEQ ID NO: 2270 - RNA, 10 nt, Unknown
  source: /note="Description of Unknown: Exemplary gene or splice site sequence"
gggguccgug

SEQ ID NO: 2271 - RNA, 10 nt, Unknown
  source: /note="Description of Unknown: Exemplary gene or splice site sequence"
ggggucggag

SEQ ID NO: 2272 - RNA, 10 nt, Unknown
  source: /note="Description of Unknown: Exemplary gene or splice site sequence"
ggggucugug

SEQ ID NO: 2273 - RNA, 10 nt, Unknown
  source: /note="Description of Unknown: Exemplary gene or splice site sequence"
ggggugaaca

SEQ ID NO: 2274 - RNA, 10 nt, Unknown
  source: /note="Description of Unknown: Exemplary gene or splice site sequence"
ggggugaaga

SEQ ID NO: 2275 - RNA, 10 nt, Unknown
  source: /note="Description of Unknown: Exemplary gene or splice site sequence"
ggggugagaa

SEQ ID NO: 2276 - RNA, 10 nt, Unknown
  source: /note="Description of Unknown: Exemplary gene or splice site sequence"
ggggugagau

SEQ ID NO: 2277 - RNA, 10 nt, Unknown
  source: /note="Description of Unknown: Exemplary gene or splice site sequence"
ggggugagcc

SEQ ID NO: 2278 - RNA, 10 nt, Unknown
  source: /note="Description of Unknown: Exemplary gene or splice site sequence"
ggggugagcg

SEQ ID NO: 2279 - RNA, 10 nt, Unknown
  source: /note="Description of Unknown: Exemplary gene or splice site sequence"
ggggugagcu

SEQ ID NO: 2280 - RNA, 10 nt, Unknown
  source: /note="Description of Unknown: Exemplary gene or splice site sequence"
ggggugagga

SEQ ID NO: 2281 - RNA, 10 nt, Unknown
  source: /note="Description of Unknown: Exemplary gene or splice site sequence"
ggggugaggc

SEQ ID NO: 2282 - RNA, 10 nt, Unknown
  source: /note="Description of Unknown: Exemplary gene or splice site sequence"
ggggugaggg

SEQ ID NO: 2283 - RNA, 10 nt, Unknown
  source: /note="Description of Unknown: Exemplary gene or splice site sequence"
ggggugaguc

SEQ ID NO: 2284 - RNA, 10 nt, Unknown
  source: /note="Description of Unknown: Exemplary gene or splice site sequence"
ggggugagug

SEQ ID NO: 2285 - RNA, 10 nt, Unknown
  source: /note="Description of Unknown: Exemplary gene or splice site sequence"
ggggugaguu

SEQ ID NO: 2286 - RNA, 10 nt, Unknown
  source: /note="Description of Unknown: Exemplary gene or splice site sequence"
ggggugcgua

SEQ ID NO: 2287 - RNA, 10 nt, Unknown
  source: /note="Description of Unknown: Exemplary gene or splice site sequence"
gggguggggu

SEQ ID NO: 2288 - RNA, 10 nt, Unknown
  source: /note="Description of Unknown: Exemplary gene or splice site sequence"
ggggugggua

SEQ ID NO: 2289 - RNA, 10 nt, Unknown
  source: /note="Description of Unknown: Exemplary gene or splice site sequence"
ggggugggug

SEQ ID NO: 2290 - RNA, 10 nt, Unknown
  source: /note="Description of Unknown: Exemplary gene or splice site sequence"
gggguggguu

SEQ ID NO: 2291 - RNA, 10 nt, Unknown
  source: /note="Description of Unknown: Exemplary gene or splice site sequence"
ggggugugcg

SEQ ID NO: 2292 - RNA, 10 nt, Unknown
  source: /note="Description of Unknown: Exemplary gene or splice site sequence"
ggggugugua

SEQ ID NO: 2293 - RNA, 10 nt, Unknown
  source: /note="Description of Unknown: Exemplary gene or splice site sequence"
gggguguguc

SEQ ID NO: 2294 - RNA, 10 nt, Unknown
  source: /note="Description of Unknown: Exemplary gene or splice site sequence"
ggggugugug

SEQ ID NO: 2295 - RNA, 10 nt, Unknown
  source: /note="Description of Unknown: Exemplary gene or splice site sequence"
gggguuacag

SEQ ID NO: 2296 - RNA, 10 nt, Unknown
  source: /note="Description of Unknown: Exemplary gene or splice site sequence"
gggguuggac

SEQ ID NO: 2297 - RNA, 10 nt, Unknown
  source: /note="Description of Unknown: Exemplary gene or splice site sequence"
gggguuggga

SEQ ID NO: 2298 - RNA, 10 nt, Unknown
  source: /note="Description of Unknown: Exemplary gene or splice site sequence"
gggguuugcc

SEQ ID NO: 2299 - RNA, 10 nt, Unknown
  source: /note="Description of Unknown: Exemplary gene or splice site sequence"
gggguuugua

SEQ ID NO: 2300 - RNA, 10 nt, Unknown
  source: /note="Description of Unknown: Exemplary gene or splice site sequence"
gguguaagaa

SEQ ID NO: 2301 - RNA, 10 nt, Unknown
  source: /note="Description of Unknown: Exemplary gene or splice site sequence"
gguguaagau

SEQ ID NO: 2302 - RNA, 10 nt, Unknown
  source: /note="Description of Unknown: Exemplary gene or splice site sequence"
gguguaagca

SEQ ID NO: 2303 - RNA, 10 nt, Unknown
  source: /note="Description of Unknown: Exemplary gene or splice site sequence"
gguguaagcc

SEQ ID NO: 2304 - RNA, 10 nt, Unknown
  source: /note="Description of Unknown: Exemplary gene or splice site sequence"
gguguaagcg

SEQ ID NO: 2305 - RNA, 10 nt, Unknown
  source: /note="Description of Unknown: Exemplary gene or splice site sequence"
gguguaaguc

SEQ ID NO: 2306 - RNA, 10 nt, Unknown
  source: /note="Description of Unknown: Exemplary gene or splice site sequence"
gguguaagug

SEQ ID NO: 2307 - RNA, 10 nt, Unknown
  source: /note="Description of Unknown: Exemplary gene or splice site sequence"
gguguagguc

SEQ ID NO: 2308 - RNA, 10 nt, Unknown
  source: /note="Description of Unknown: Exemplary gene or splice site sequence"
gguguaggug

SEQ ID NO: 2309 - RNA, 10 nt, Unknown
  source: /note="Description of Unknown: Exemplary gene or splice site sequence"
gguguagguu

SEQ ID NO: 2310 - RNA, 10 nt, Unknown
  source: /note="Description of Unknown: Exemplary gene or splice site sequence"
gguguccgua

SEQ ID NO: 2311 - RNA, 10 nt, Unknown
  source: /note="Description of Unknown: Exemplary gene or splice site sequence"
ggugugagag

SEQ ID NO: 2312 - RNA, 10 nt, Unknown
  source: /note="Description of Unknown: Exemplary gene or splice site sequence"
ggugugagcc

SEQ ID NO: 2313 - RNA, 10 nt, Unknown
  source: /note="Description of Unknown: Exemplary gene or splice site sequence"
ggugugagcu

SEQ ID NO: 2314 - RNA, 10 nt, Unknown
  source: /note="Description of Unknown: Exemplary gene or splice site sequence"
ggugugagua

SEQ ID NO: 2315 - RNA, 10 nt, Unknown
  source: /note="Description of Unknown: Exemplary gene or splice site sequence"
ggugugaguc

SEQ ID NO: 2316 - RNA, 10 nt, Unknown
  source: /note="Description of Unknown: Exemplary gene or splice site sequence"
ggugugcuuc

SEQ ID NO: 2317 - RNA, 10 nt, Unknown
  source: /note="Description of Unknown: Exemplary gene or splice site sequence"
gguguggcug

SEQ ID NO: 2318 - RNA, 10 nt, Unknown
  source: /note="Description of Unknown: Exemplary gene or splice site sequence"
ggugugguga

SEQ ID NO: 2319 - RNA, 10 nt, Unknown
  source: /note="Description of Unknown: Exemplary gene or splice site sequence"
ggugugucug

SEQ ID NO: 2320 - RNA, 10 nt, Unknown
  source: /note="Description of Unknown: Exemplary gene or splice site sequence"
gguguugaaa

SEQ ID NO: 2321 - RNA, 10 nt, Unknown
  source: /note="Description of Unknown: Exemplary gene or splice site sequence"
gguguugcug

SEQ ID NO: 2322 - RNA, 10 nt, Unknown
  source: /note="Description of Unknown: Exemplary gene or splice site sequence"
guaguaagau

SEQ ID NO: 2323 - RNA, 10 nt, Unknown
  source: /note="Description of Unknown: Exemplary gene or splice site sequence"
guaguaagua

SEQ ID NO: 2324 - RNA, 10 nt, Unknown
  source: /note="Description of Unknown: Exemplary gene or splice site sequence"
guaguaagug

SEQ ID NO: 2325 - RNA, 10 nt, Unknown
  source: /note="Description of Unknown: Exemplary gene or splice site sequence"
guaguagcuu

SEQ ID NO: 2326 - RNA, 10 nt, Unknown
  source: /note="Description of Unknown: Exemplary gene or splice site sequence"
guaguaggua

SEQ ID NO: 2327 - RNA, 10 nt, Unknown
  source: /note="Description of Unknown: Exemplary gene or splice site sequence"
guagucagua

SEQ ID NO: 2328 - RNA, 10 nt, Unknown
  source: /note="Description of Unknown: Exemplary gene or splice site sequence"
guagugagua

SEQ ID NO: 2329 - RNA, 10 nt, Unknown
  source: /note="Description of Unknown: Exemplary gene or splice site sequence"
guaguggugg

SEQ ID NO: 2330 - RNA, 10 nt, Unknown
  source: /note="Description of Unknown: Exemplary gene or splice site sequence"
guaguuaagu

SEQ ID NO: 2331 - RNA, 10 nt, Unknown
  source: /note="Description of Unknown: Exemplary gene or splice site sequence"
guaguuucug

SEQ ID NO: 2332 - RNA, 10 nt, Unknown
  source: /note="Description of Unknown: Exemplary gene or splice site sequence"
gucguaagug

SEQ ID NO: 2333 - RNA, 10 nt, Unknown
  source: /note="Description of Unknown: Exemplary gene or splice site sequence"
gucgugagug

SEQ ID NO: 2334 - RNA, 10 nt, Unknown
  source: /note="Description of Unknown: Exemplary gene or splice site sequence"
gucgugaguu

SEQ ID NO: 2335 - RNA, 10 nt, Unknown
  source: /note="Description of Unknown: Exemplary gene or splice site sequence"
guggcaagua

SEQ ID NO: 2336 - RNA, 10 nt, Unknown
  source: /note="Description of Unknown: Exemplary gene or splice site sequence"
guggcuugua

SEQ ID NO: 2337 - RNA, 10 nt, Unknown
  source: /note="Description of Unknown: Exemplary gene or splice site sequence"
gugguaaaau

SEQ ID NO: 2338 - RNA, 10 nt, Unknown
  source: /note="Description of Unknown: Exemplary gene or splice site sequence"
gugguaaaga

SEQ ID NO: 2339 - RNA, 10 nt, Unknown
  source: /note="Description of Unknown: Exemplary gene or splice site sequence"
gugguaaauu

SEQ ID NO: 2340 - RNA, 10 nt, Unknown
  source: /note="Description of Unknown: Exemplary gene or splice site sequence"
gugguaacau

SEQ ID NO: 2341 - RNA, 10 nt, Unknown
  source: /note="Description of Unknown: Exemplary gene or splice site sequence"
gugguaacua

SEQ ID NO: 2342 - RNA, 10 nt, Unknown
  source: /note="Description of Unknown: Exemplary gene or splice site sequence"
gugguaagaa

SEQ ID NO: 2343 - RNA, 10 nt, Unknown
  source: /note="Description of Unknown: Exemplary gene or splice site sequence"
gugguaagac

SEQ ID NO: 2344 - RNA, 10 nt, Unknown
  source: /note="Description of Unknown: Exemplary gene or splice site sequence"
gugguaagag

SEQ ID NO: 2345 - RNA, 10 nt, Unknown
  source: /note="Description of Unknown: Exemplary gene or splice site sequence"
gugguaagau

SEQ ID NO: 2346 - RNA, 10 nt, Unknown
  source: /note="Description of Unknown: Exemplary gene or splice site sequence"
gugguaagca

SEQ ID NO: 2347 - RNA, 10 nt, Unknown
  source: /note="Description of Unknown: Exemplary gene or splice site sequence"
gugguaagcg

SEQ ID NO: 2348 - RNA, 10 nt, Unknown
  source: /note="Description of Unknown: Exemplary gene or splice site sequence"
gugguaagcu

SEQ ID NO: 2349 - RNA, 10 nt, Unknown
  source: /note="Description of Unknown: Exemplary gene or splice site sequence"
gugguaagga

SEQ ID NO: 2350 - RNA, 10 nt, Unknown
  source: /note="Description of Unknown: Exemplary gene or splice site sequence"
gugguaaggc

SEQ ID NO: 2351 - RNA, 10 nt, Unknown
  source: /note="Description of Unknown: Exemplary gene or splice site sequence"
gugguaagua

SEQ ID NO: 2352 - RNA, 10 nt, Unknown
  source: /note="Description of Unknown: Exemplary gene or splice site sequence"
gugguaaguc

SEQ ID NO: 2353 - RNA, 10 nt, Unknown
  source: /note="Description of Unknown: Exemplary gene or splice site sequence"
gugguaagug

SEQ ID NO: 2354 - RNA, 10 nt, Unknown
  source: /note="Description of Unknown: Exemplary gene or splice site sequence"
gugguaaguu

SEQ ID NO: 2355 - RNA, 10 nt, Unknown
  source: /note="Description of Unknown: Exemplary gene or splice site sequence"
gugguaauga

SEQ ID NO: 2356 - RNA, 10 nt, Unknown
  source: /note="Description of Unknown: Exemplary gene or splice site sequence"
gugguaauuc

SEQ ID NO: 2357 - RNA, 10 nt, Unknown
  source: /note="Description of Unknown: Exemplary gene or splice site sequence"
gugguaauuu

SEQ ID NO: 2358 - RNA, 10 nt, Unknown
  source: /note="Description of Unknown: Exemplary gene or splice site sequence"
gugguacaug

SEQ ID NO: 2359 - RNA, 10 nt, Unknown
  source: /note="Description of Unknown: Exemplary gene or splice site sequence"
gugguacgau

SEQ ID NO: 2360 - RNA, 10 nt, Unknown
  source: /note="Description of Unknown: Exemplary gene or splice site sequence"
gugguacuau

SEQ ID NO: 2361 - RNA, 10 nt, Unknown
  source: /note="Description of Unknown: Exemplary gene or splice site sequence"
gugguacuug

SEQ ID NO: 2362 - RNA, 10 nt, Unknown
  source: /note="Description of Unknown: Exemplary gene or splice site sequence"
gugguagaua

SEQ ID NO: 2363 - RNA, 10 nt, Unknown
  source: /note="Description of Unknown: Exemplary gene or splice site sequence"
gugguagcgc

SEQ ID NO: 2364 - RNA, 10 nt, Unknown
  source: /note="Description of Unknown: Exemplary gene or splice site sequence"
gugguaggga

SEQ ID NO: 2365 - RNA, 10 nt, Unknown
  source: /note="Description of Unknown: Exemplary gene or splice site sequence"
gugguagguc

SEQ ID NO: 2366 - RNA, 10 nt, Unknown
  source: /note="Description of Unknown: Exemplary gene or splice site sequence"
gugguaggug

SEQ ID NO: 2367 - RNA, 10 nt, Unknown
  source: /note="Description of Unknown: Exemplary gene or splice site sequence"
gugguagguu

SEQ ID NO: 2368 - RNA, 10 nt, Unknown
  source: /note="Description of Unknown: Exemplary gene or splice site sequence"
gugguauaaa

SEQ ID NO: 2369 - RNA, 10 nt, Unknown
  source: /note="Description of Unknown: Exemplary gene or splice site sequence"
gugguaucuc

SEQ ID NO: 2370 - RNA, 10 nt, Unknown
  source: /note="Description of Unknown: Exemplary gene or splice site sequence"
gugguaugaa

SEQ ID NO: 2371 - RNA, 10 nt, Unknown
  source: /note="Description of Unknown: Exemplary gene or splice site sequence"
gugguaugau

SEQ ID NO: 2372 - RNA, 10 nt, Unknown
  source: /note="Description of Unknown: Exemplary gene or splice site sequence"
gugguaugca

SEQ ID NO: 2373 - RNA, 10 nt, Unknown
  source: /note="Description of Unknown: Exemplary gene or splice site sequence"
gugguaugua

SEQ ID NO: 2374 - RNA, 10 nt, Unknown
  source: /note="Description of Unknown: Exemplary gene or splice site sequence"
gugguauguu

SEQ ID NO: 2375 - RNA, 10 nt, Unknown
  source: /note="Description of Unknown: Exemplary gene or splice site sequence"
gugguccgug

SEQ ID NO: 2376 - RNA, 10 nt, Unknown
  source: /note="Description of Unknown: Exemplary gene or splice site sequence"
guggucuggc

SEQ ID NO: 2377 - RNA, 10 nt, Unknown
  source: /note="Description of Unknown: Exemplary gene or splice site sequence"
guggugaaac

SEQ ID NO: 2378 - RNA, 10 nt, Unknown
  source: /note="Description of Unknown: Exemplary gene or splice site sequence"
guggugagaa

SEQ ID NO: 2379 - RNA, 10 nt, Unknown
  source: /note="Description of Unknown: Exemplary gene or splice site sequence"
guggugagau

SEQ ID NO: 2380 - RNA, 10 nt, Unknown
  source: /note="Description of Unknown: Exemplary gene or splice site sequence"
guggugagca

SEQ ID NO: 2381 - RNA, 10 nt, Unknown
  source: /note="Description of Unknown: Exemplary gene or splice site sequence"
guggugagcu

SEQ ID NO: 2382 - RNA, 10 nt, Unknown
  source: /note="Description of Unknown: Exemplary gene or splice site sequence"
guggugagga

SEQ ID NO: 2383 - RNA, 10 nt, Unknown
  source: /note="Description of Unknown: Exemplary gene or splice site sequence"
guggugaggc

SEQ ID NO: 2384 - RNA, 10 nt, Unknown
  source: /note="Description of Unknown: Exemplary gene or splice site sequence"
guggugagug

SEQ ID NO: 2385 - RNA, 10 nt, Unknown
  source: /note="Description of Unknown: Exemplary gene or splice site sequence"
guggugaguu

SEQ ID NO: 2386 - RNA, 10 nt, Unknown
  source: /note="Description of Unknown: Exemplary gene or splice site sequence"
guggugauua

SEQ ID NO: 2387 - RNA, 10 nt, Unknown
  source: /note="Description of Unknown: Exemplary gene or splice site sequence"
guggugauuc

SEQ ID NO: 2388 - RNA, 10 nt, Unknown
  source: /note="Description of Unknown: Exemplary gene or splice site sequence"
guggugcgau

SEQ ID NO: 2389 - RNA, 10 nt, Unknown
  source: /note="Description of Unknown: Exemplary gene or splice site sequence"
guggugcuua

SEQ ID NO: 2390 - RNA, 10 nt, Unknown
  source: /note="Description of Unknown: Exemplary gene or splice site sequence"
guggugggaa

SEQ ID NO: 2391 - RNA, 10 nt, Unknown
  source: /note="Description of Unknown: Exemplary gene or splice site sequence"
guggugggua

SEQ ID NO: 2392 - RNA, 10 nt, Unknown
  source: /note="Description of Unknown: Exemplary gene or splice site sequence"
gugguggguc

SEQ ID NO: 2393 - RNA, 10 nt, Unknown
  source: /note="Description of Unknown: Exemplary gene or splice site sequence"
gugguguccg

SEQ ID NO: 2394 - RNA, 10 nt, Unknown
  source: /note="Description of Unknown: Exemplary gene or splice site sequence"
gugguuagca

SEQ ID NO: 2395 - RNA, 10 nt, Unknown
  source: /note="Description of Unknown: Exemplary gene or splice site sequence"
gugguuaggu

SEQ ID NO: 2396 - RNA, 10 nt, Unknown
  source: /note="Description of Unknown: Exemplary gene or splice site sequence"
gugguuagug

SEQ ID NO: 2397 - RNA, 10 nt, Unknown
  source: /note="Description of Unknown: Exemplary gene or splice site sequence"
gugguuugca

SEQ ID NO: 2398 - RNA, 10 nt, Unknown
  source: /note="Description of Unknown: Exemplary gene or splice site sequence"
gugguuugua

SEQ ID NO: 2399 - RNA, 10 nt, Unknown
  source: /note="Description of Unknown: Exemplary gene or splice site sequence"
guuguaaggu

SEQ ID NO: 2400 - RNA, 10 nt, Unknown
  source: /note="Description of Unknown: Exemplary gene or splice site sequence"
guuguaagua

SEQ ID NO: 2401 - RNA, 10 nt, Unknown
  source: /note="Description of Unknown: Exemplary gene or splice site sequence"
guuguaaguc

SEQ ID NO: 2402 - RNA, 10 nt, Unknown
  source: /note="Description of Unknown: Exemplary gene or splice site sequence"
guuguaaguu

SEQ ID NO: 2403 - RNA, 10 nt, Unknown
  source: /note="Description of Unknown: Exemplary gene or splice site sequence"
guuguaccac

SEQ ID NO: 2404 - RNA, 10 nt, Unknown
  source: /note="Description of Unknown: Exemplary gene or splice site sequence"
guuguagcgu

SEQ ID NO: 2405 - RNA, 10 nt, Unknown
  source: /note="Description of Unknown: Exemplary gene or splice site sequence"
guuguaugug

SEQ ID NO: 2406 - RNA, 10 nt, Unknown
  source: /note="Description of Unknown: Exemplary gene or splice site sequence"
guuguauguu

SEQ ID NO: 2407 - RNA, 10 nt, Unknown
  source: /note="Description of Unknown: Exemplary gene or splice site sequence"
guugucugug

SEQ ID NO: 2408 - RNA, 10 nt, Unknown
  source: /note="Description of Unknown: Exemplary gene or splice site sequence"
guugugagcu

SEQ ID NO: 2409 - RNA, 10 nt, Unknown
  source: /note="Description of Unknown: Exemplary gene or splice site sequence"
guugugagug

SEQ ID NO: 2410 - RNA, 10 nt, Unknown
  source: /note="Description of Unknown: Exemplary gene or splice site sequence"
guugugaguu

SEQ ID NO: 2411 - RNA, 10 nt, Unknown
  source: /note="Description of Unknown: Exemplary gene or splice site sequence"
guugugggua

SEQ ID NO: 2412 - RNA, 10 nt, Unknown
  source: /note="Description of Unknown: Exemplary gene or splice site sequence"
guuguggguu

SEQ ID NO: 2413 - RNA, 10 nt, Unknown
  source: /note="Description of Unknown: Exemplary gene or splice site sequence"
uaaguaaaug

SEQ ID NO: 2414 - RNA, 10 nt, Unknown
  source: /note="Description of Unknown: Exemplary gene or splice site sequence"
uaaguaacua

SEQ ID NO: 2415 - RNA, 10 nt, Unknown
  source: /note="Description of Unknown: Exemplary gene or splice site sequence"
uaaguaagaa

SEQ ID NO: 2416 - RNA, 10 nt, Unknown
  source: /note="Description of Unknown: Exemplary gene or splice site sequence"
uaaguaagag

SEQ ID NO: 2417 - RNA, 10 nt, Unknown
  source: /note="Description of Unknown: Exemplary gene or splice site sequence"
uaaguaagau

SEQ ID NO: 2418 - RNA, 10 nt, Unknown
  source: /note="Description of Unknown: Exemplary gene or splice site sequence"
uaaguaagca

SEQ ID NO: 2419 - RNA, 10 nt, Unknown
  source: /note="Description of Unknown: Exemplary gene or splice site sequence"
uaaguaagcu

SEQ ID NO: 2420 - RNA, 10 nt, Unknown
  source: /note="Description of Unknown: Exemplary gene or splice site sequence"
uaaguaagga

SEQ ID NO: 2421 - RNA, 10 nt, Unknown
  source: /note="Description of Unknown: Exemplary gene or splice site sequence"
uaaguaaggu

SEQ ID NO: 2422 - RNA, 10 nt, Unknown
  source: /note="Description of Unknown: Exemplary gene or splice site sequence"
uaaguaagua

SEQ ID NO: 2423 - RNA, 10 nt, Unknown
  source: /note="Description of Unknown: Exemplary gene or splice site sequence"
uaaguaaguc

SEQ ID NO: 2424 - RNA, 10 nt, Unknown
  source: /note="Description of Unknown: Exemplary gene or splice site sequence"
uaaguaagug

SEQ ID NO: 2425 - RNA, 10 nt, Unknown
  source: /note="Description of Unknown: Exemplary gene or splice site sequence"
uaaguaaguu

SEQ ID NO: 2426 - RNA, 10 nt, Unknown
  source: /note="Description of Unknown: Exemplary gene or splice site sequence"
uaaguaauaa

SEQ ID NO: 2427 - RNA, 10 nt, Unknown
  source: /note="Description of Unknown: Exemplary gene or splice site sequence"
uaaguacuag

SEQ ID NO: 2428 - RNA, 10 nt, Unknown
  source: /note="Description of Unknown: Exemplary gene or splice site sequence"
uaaguaguuu

SEQ ID NO: 2429 - RNA, 10 nt, Unknown
  source: /note="Description of Unknown: Exemplary gene or splice site sequence"
uaaguauaaa

SEQ ID NO: 2430 - RNA, 10 nt, Unknown
  source: /note="Description of Unknown: Exemplary gene or splice site sequence"
uaaguauaca

SEQ ID NO: 2431 - RNA, 10 nt, Unknown
  source: /note="Description of Unknown: Exemplary gene or splice site sequence"
uaaguaugua

SEQ ID NO: 2432 - RNA, 10 nt, Unknown
  source: /note="Description of Unknown: Exemplary gene or splice site sequence"
uaaguauuau

SEQ ID NO: 2433 - RNA, 10 nt, Unknown
  source: /note="Description of Unknown: Exemplary gene or splice site sequence"
uaaguauuuu

SEQ ID NO: 2434 - RNA, 10 nt, Unknown
  source: /note="Description of Unknown: Exemplary gene or splice site sequence"
uaagucuuuu

SEQ ID NO: 2435 - RNA, 10 nt, Unknown
  source: /note="Description of Unknown: Exemplary gene or splice site sequence"
uaagugagac

SEQ ID NO: 2436 - RNA, 10 nt, Unknown
  source: /note="Description of Unknown: Exemplary gene or splice site sequence"
uaagugagga

SEQ ID NO: 2437 - RNA, 10 nt, Unknown
  source: /note="Description of Unknown: Exemplary gene or splice site sequence"
uaagugaggg

SEQ ID NO: 2438 - RNA, 10 nt, Unknown
  source: /note="Description of Unknown: Exemplary gene or splice site sequence"
uaagugagua

SEQ ID NO: 2439 - RNA, 10 nt, Unknown
  source: /note="Description of Unknown: Exemplary gene or splice site sequence"
uaagugaguc

SEQ ID NO: 2440 - RNA, 10 nt, Unknown
  source: /note="Description of Unknown: Exemplary gene or splice site sequence"
uaagugagug

SEQ ID NO: 2441 - RNA, 10 nt, Unknown
  source: /note="Description of Unknown: Exemplary gene or splice site sequence"
uaagugaguu

SEQ ID NO: 2442 - RNA, 10 nt, Unknown
  source: /note="Description of Unknown: Exemplary gene or splice site sequence"
uaagugaucc

SEQ ID NO: 2443 - RNA, 10 nt, Unknown
  source: /note="Description of Unknown: Exemplary gene or splice site sequence"
uaagugauuc

SEQ ID NO: 2444 - RNA, 10 nt, Unknown
  source: /note="Description of Unknown: Exemplary gene or splice site sequence"
uaagugcgug

SEQ ID NO: 2445 - RNA, 10 nt, Unknown
  source: /note="Description of Unknown: Exemplary gene or splice site sequence"
uaaguuaagu

SEQ ID NO: 2446 - RNA, 10 nt, Unknown
  source: /note="Description of Unknown: Exemplary gene or splice site sequence"
uaaguuccag

SEQ ID NO: 2447 - RNA, 10 nt, Unknown
  source: /note="Description of Unknown: Exemplary gene or splice site sequence"
uaaguucuuu

SEQ ID NO: 2448 - RNA, 10 nt, Unknown
  source: /note="Description of Unknown: Exemplary gene or splice site sequence"
uaaguuguaa

SEQ ID NO: 2449 - RNA, 10 nt, Unknown
  source: /note="Description of Unknown: Exemplary gene or splice site sequence"
uaaguuguau

SEQ ID NO: 2450 - RNA, 10 nt, Unknown
  source: /note="Description of Unknown: Exemplary gene or splice site sequence"
uaaguuuguu

SEQ ID NO: 2451 - RNA, 10 nt, Unknown
  source: /note="Description of Unknown: Exemplary gene or splice site sequence"
uacguaacug

SEQ ID NO: 2452 - RNA, 10 nt, Unknown
  source: /note="Description of Unknown: Exemplary gene or splice site sequence"
uacguaagaa

SEQ ID NO: 2453 - RNA, 10 nt, Unknown
  source: /note="Description of Unknown: Exemplary gene or splice site sequence"
uacguaagau

SEQ ID NO: 2454 - RNA, 10 nt, Unknown
  source: /note="Description of Unknown: Exemplary gene or splice site sequence"
uacguaagua

SEQ ID NO: 2455 - RNA, 10 nt, Unknown
  source: /note="Description of Unknown: Exemplary gene or splice site sequence"
uacguaagug

SEQ ID NO: 2456 - RNA, 10 nt, Unknown
  source: /note="Description of Unknown: Exemplary gene or splice site sequence"
uacguauccu

SEQ ID NO: 2457 - RNA, 10 nt, Unknown
  source: /note="Description of Unknown: Exemplary gene or splice site sequence"
uacgucuggc

SEQ ID NO: 2458 - RNA, 10 nt, Unknown
  source: /note="Description of Unknown: Exemplary gene or splice site sequence"
uacgugacca

SEQ ID NO: 2459 - RNA, 10 nt, Unknown
  source: /note="Description of Unknown: Exemplary gene or splice site sequence"
uaggcaagac

SEQ ID NO: 2460 - RNA, 10 nt, Unknown
  source: /note="Description of Unknown: Exemplary gene or splice site sequence"
uaggcaaguc

SEQ ID NO: 2461 - RNA, 10 nt, Unknown
  source: /note="Description of Unknown: Exemplary gene or splice site sequence"
uaggcagguc

SEQ ID NO: 2462 - RNA, 10 nt, Unknown
  source: /note="Description of Unknown: Exemplary gene or splice site sequence"
uaggcgugug

SEQ ID NO: 2463 - RNA, 10 nt, Unknown
  source: /note="Description of Unknown: Exemplary gene or splice site sequence"
uagguaaaaa

SEQ ID NO: 2464 - RNA, 10 nt, Unknown
  source: /note="Description of Unknown: Exemplary gene or splice site sequence"
uagguaaaac

SEQ ID NO: 2465 - RNA, 10 nt, Unknown
  source: /note="Description of Unknown: Exemplary gene or splice site sequence"
uagguaaaag

SEQ ID NO: 2466 - RNA, 10 nt, Unknown
  source: /note="Description of Unknown: Exemplary gene or splice site sequence"
uagguaaaau

SEQ ID NO: 2467 - RNA, 10 nt, Unknown
  source: /note="Description of Unknown: Exemplary gene or splice site sequence"
uagguaaaca

SEQ ID NO: 2468 - RNA, 10 nt, Unknown
  source: /note="Description of Unknown: Exemplary gene or splice site sequence"
uagguaaaga

SEQ ID NO: 2469 - RNA, 10 nt, Unknown
  source: /note="Description of Unknown: Exemplary gene or splice site sequence"
uagguaaaua

SEQ ID NO: 2470 - RNA, 10 nt, Unknown
  source: /note="Description of Unknown: Exemplary gene or splice site sequence"
uagguaaauc

SEQ ID NO: 2471 - RNA, 10 nt, Unknown
  source: /note="Description of Unknown: Exemplary gene or splice site sequence"
uagguaaaug

SEQ ID NO: 2472 - RNA, 10 nt, Unknown
  source: /note="Description of Unknown: Exemplary gene or splice site sequence"
uagguaaauu

SEQ ID NO: 2473 - RNA, 10 nt, Unknown
  source: /note="Description of Unknown: Exemplary gene or splice site sequence"
uagguaacac

SEQ ID NO: 2474 - RNA, 10 nt, Unknown
  source: /note="Description of Unknown: Exemplary gene or splice site sequence"
uagguaacag

SEQ ID NO: 2475 - RNA, 10 nt, Unknown
  source: /note="Description of Unknown: Exemplary gene or splice site sequence"
uagguaacau

SEQ ID NO: 2476 - RNA, 10 nt, Unknown
  source: /note="Description of Unknown: Exemplary gene or splice site sequence"
uagguaacca

SEQ ID NO: 2477 - RNA, 10 nt, Unknown
  source: /note="Description of Unknown: Exemplary gene or splice site sequence"
uagguaacgg

SEQ ID NO: 2478 - RNA, 10 nt, Unknown
  source: /note="Description of Unknown: Exemplary gene or splice site sequence"
uagguaacua

SEQ ID NO: 2479 - RNA, 10 nt, Unknown
  source: /note="Description of Unknown: Exemplary gene or splice site sequence"
uagguaacuc

SEQ ID NO: 2480 - RNA, 10 nt, Unknown
  source: /note="Description of Unknown: Exemplary gene or splice site sequence"
uagguaacug

SEQ ID NO: 2481 - RNA, 10 nt, Unknown
  source: /note="Description of Unknown: Exemplary gene or splice site sequence"
uagguaacuu

SEQ ID NO: 2482 - RNA, 10 nt, Unknown
  source: /note="Description of Unknown: Exemplary gene or splice site sequence"
uagguaagac

SEQ ID NO: 2483 - RNA, 10 nt, Unknown
  source: /note="Description of Unknown: Exemplary gene or splice site sequence"
uagguaagag

SEQ ID NO: 2484 - RNA, 10 nt, Unknown
  source: /note="Description of Unknown: Exemplary gene or splice site sequence"
uagguaagau

SEQ ID NO: 2485 - RNA, 10 nt, Unknown
  source: /note="Description of Unknown: Exemplary gene or splice site sequence"
uagguaagca

SEQ ID NO: 2486 - RNA, 10 nt, Unknown
  source: /note="Description of Unknown: Exemplary gene or splice site sequence"
uagguaagcc

SEQ ID NO: 2487 - RNA, 10 nt, Unknown
  source: /note="Description of Unknown: Exemplary gene or splice site sequence"
uagguaagcu

SEQ ID NO: 2488 - RNA, 10 nt, Unknown
  source: /note="Description of Unknown: Exemplary gene or splice site sequence"
uagguaagga

SEQ ID NO: 2489 - RNA, 10 nt, Unknown
  source: /note="Description of Unknown: Exemplary gene or splice site sequence"
uagguaaggc

SEQ ID NO: 2490 - RNA, 10 nt, Unknown
  source: /note="Description of Unknown: Exemplary gene or splice site sequence"
uagguaaggg

SEQ ID NO: 2491 - RNA, 10 nt, Unknown
  source: /note="Description of Unknown: Exemplary gene or splice site sequence"
uagguaagua

SEQ ID NO: 2492 - RNA, 10 nt, Unknown
  source: /note="Description of Unknown: Exemplary gene or splice site sequence"
uagguaaguc

SEQ ID NO: 2493 - RNA, 10 nt, Unknown
  source: /note="Description of Unknown: Exemplary gene or splice site sequence"
uagguaagug

SEQ ID NO: 2494 - RNA, 10 nt, Unknown
  source: /note="Description of Unknown: Exemplary gene or splice site sequence"
uagguaaguu

SEQ ID NO: 2495 - RNA, 10 nt, Unknown
  source: /note="Description of Unknown: Exemplary gene or splice site sequence"
uagguaauag

SEQ ID NO: 2496 - RNA, 10 nt, Unknown
  source: /note="Description of Unknown: Exemplary gene or splice site sequence"
uagguaauau

SEQ ID NO: 2497 - RNA, 10 nt, Unknown
  source: /note="Description of Unknown: Exemplary gene or splice site sequence"
uagguaaucu

SEQ ID NO: 2498 - RNA, 10 nt, Unknown
  source: /note="Description of Unknown: Exemplary gene or splice site sequence"
uagguaauga

SEQ ID NO: 2499 - RNA, 10 nt, Unknown
  source: /note="Description of Unknown: Exemplary gene or splice site sequence"
uagguaaugg

SEQ ID NO: 2500 - RNA, 10 nt, Unknown
  source: /note="Description of Unknown: Exemplary gene or splice site sequence"
uagguaaugu

SEQ ID NO: 2501 - RNA, 10 nt, Unknown
  source: /note="Description of Unknown: Exemplary gene or splice site sequence"
uagguaauua

SEQ ID NO: 2502 - RNA, 10 nt, Unknown
  source: /note="Description of Unknown: Exemplary gene or splice site sequence"
uagguaauuc

SEQ ID NO: 2503 - RNA, 10 nt, Unknown
  source: /note="Description of Unknown: Exemplary gene or splice site sequence"
uagguaauuu

SEQ ID NO: 2504 - RNA, 10 nt, Unknown
  source: /note="Description of Unknown: Exemplary gene or splice site sequence"
uagguacagc

SEQ ID NO: 2505 - RNA, 10 nt, Unknown
  source: /note="Description of Unknown: Exemplary gene or splice site sequence"
uagguacagu

SEQ ID NO: 2506 - RNA, 10 nt, Unknown
  source: /note="Description of Unknown: Exemplary gene or splice site sequence"
uagguacauu

SEQ ID NO: 2507 - RNA, 10 nt, Unknown
  source: /note="Description of Unknown: Exemplary gene or splice site sequence"
uagguaccag

SEQ ID NO: 2508 - RNA, 10 nt, Unknown
  source: /note="Description of Unknown: Exemplary gene or splice site sequence"
uagguaccua

SEQ ID NO: 2509 - RNA, 10 nt, Unknown
  source: /note="Description of Unknown: Exemplary gene or splice site sequence"
uagguaccuu

SEQ ID NO: 2510 - RNA, 10 nt, Unknown
  source: /note="Description of Unknown: Exemplary gene or splice site sequence"
uagguacgag

SEQ ID NO: 2511 - RNA, 10 nt, Unknown
  source: /note="Description of Unknown: Exemplary gene or splice site sequence"
uagguacgua

SEQ ID NO: 2512 - RNA, 10 nt, Unknown
  source: /note="Description of Unknown: Exemplary gene or splice site sequence"
uagguacguu

SEQ ID NO: 2513 - RNA, 10 nt, Unknown
  source: /note="Description of Unknown: Exemplary gene or splice site sequence"
uagguacuau

SEQ ID NO: 2514 - RNA, 10 nt, Unknown
  source: /note="Description of Unknown: Exemplary gene or splice site sequence"
uagguacuga

SEQ ID NO: 2515 - RNA, 10 nt, Unknown
  source: /note="Description of Unknown: Exemplary gene or splice site sequence"
uagguacugg

SEQ ID NO: 2516 - RNA, 10 nt, Unknown
  source: /note="Description of Unknown: Exemplary gene or splice site sequence"
uagguacuuc

SEQ ID NO: 2517 - RNA, 10 nt, Unknown
  source: /note="Description of Unknown: Exemplary gene or splice site sequence"
uagguacuuu

SEQ ID NO: 2518 - RNA, 10 nt, Unknown
  source: /note="Description of Unknown: Exemplary gene or splice site sequence"
uagguagcgg

SEQ ID NO: 2519 - RNA, 10 nt, Unknown
  source: /note="Description of Unknown: Exemplary gene or splice site sequence"
uagguaggaa

SEQ ID NO: 2520 - RNA, 10 nt, Unknown
  source: /note="Description of Unknown: Exemplary gene or splice site sequence"
uagguaggac

SEQ ID NO: 2521 - RNA, 10 nt, Unknown
  source: /note="Description of Unknown: Exemplary gene or splice site sequence"
uagguaggau

SEQ ID NO: 2522 - RNA, 10 nt, Unknown
  source: /note="Description of Unknown: Exemplary gene or splice site sequence"
uagguaggga

SEQ ID NO: 2523 - RNA, 10 nt, Unknown
  source: /note="Description of Unknown: Exemplary gene or splice site sequence"
uagguagggg

SEQ ID NO: 2524 - RNA, 10 nt, Unknown
  source: /note="Description of Unknown: Exemplary gene or splice site sequence"
uagguaggua

SEQ ID NO: 2525 - RNA, 10 nt, Unknown
  source: /note="Description of Unknown: Exemplary gene or splice site sequence"
uagguagguc

SEQ ID NO: 2526 - RNA, 10 nt, Unknown
  source: /note="Description of Unknown: Exemplary gene or splice site sequence"
uagguaggug

SEQ ID NO: 2527 - RNA, 10 nt, Unknown
  source: /note="Description of Unknown: Exemplary gene or splice site sequence"
uagguagguu

SEQ ID NO: 2528 - RNA, 10 nt, Unknown
  source: /note="Description of Unknown: Exemplary gene or splice site sequence"
uagguaguaa

SEQ ID NO: 2529 - RNA, 10 nt, Unknown
  source: /note="Description of Unknown: Exemplary gene or splice site sequence"
uagguagucu

SEQ ID NO: 2530 - RNA, 10 nt, Unknown
  source: /note="Description of Unknown: Exemplary gene or splice site sequence"
uagguagugg

SEQ ID NO: 2531 - RNA, 10 nt, Unknown
  source: /note="Description of Unknown: Exemplary gene or splice site sequence"
uagguagugu

SEQ ID NO: 2532 - RNA, 10 nt, Unknown
  source: /note="Description of Unknown: Exemplary gene or splice site sequence"
uagguaguuu

SEQ ID NO: 2533 - RNA, 10 nt, Unknown
  source: /note="Description of Unknown: Exemplary gene or splice site sequence"
uagguauaaa

SEQ ID NO: 2534 - RNA, 10 nt, Unknown
  source: /note="Description of Unknown: Exemplary gene or splice site sequence"
uagguauaac

SEQ ID NO: 2535 - RNA, 10 nt, Unknown
  source: /note="Description of Unknown: Exemplary gene or splice site sequence"
uagguauaag

SEQ ID NO: 2536 - RNA, 10 nt, Unknown
  source: /note="Description of Unknown: Exemplary gene or splice site sequence"
uagguauaau

SEQ ID NO: 2537 - RNA, 10 nt, Unknown
  source: /note="Description of Unknown: Exemplary gene or splice site sequence"
uagguauaca

SEQ ID NO: 2538 - RNA, 10 nt, Unknown
  source: /note="Description of Unknown: Exemplary gene or splice site sequence"
uagguauacu

SEQ ID NO: 2539 - RNA, 10 nt, Unknown
  source: /note="Description of Unknown: Exemplary gene or splice site sequence"
uagguauaua

SEQ ID NO: 2540 - RNA, 10 nt, Unknown
  source: /note="Description of Unknown: Exemplary gene or splice site sequence"
uagguauauc

SEQ ID NO: 2541 - RNA, 10 nt, Unknown
  source: /note="Description of Unknown: Exemplary gene or splice site sequence"
uagguauauu

SEQ ID NO: 2542 - RNA, 10 nt, Unknown
  source: /note="Description of Unknown: Exemplary gene or splice site sequence"
uagguaucag

SEQ ID NO: 2543 - RNA, 10 nt, Unknown
  source: /note="Description of Unknown: Exemplary gene or splice site sequence"
uagguaucua

SEQ ID NO: 2544 - RNA, 10 nt, Unknown
  source: /note="Description of Unknown: Exemplary gene or splice site sequence"
uagguaucuc

SEQ ID NO: 2545 - RNA, 10 nt, Unknown
  source: /note="Description of Unknown: Exemplary gene or splice site sequence"
uagguaugaa

SEQ ID NO: 2546 - RNA, 10 nt, Unknown
  source: /note="Description of Unknown: Exemplary gene or splice site sequence"
uagguaugag

SEQ ID NO: 2547 - RNA, 10 nt, Unknown
  source: /note="Description of Unknown: Exemplary gene or splice site sequence"
uagguaugca

SEQ ID NO: 2548 - RNA, 10 nt, Unknown
  source: /note="Description of Unknown: Exemplary gene or splice site sequence"
uagguaugga

SEQ ID NO: 2549 - RNA, 10 nt, Unknown
  source: /note="Description of Unknown: Exemplary gene or splice site sequence"
uagguauggc

SEQ ID NO: 2550 - RNA, 10 nt, Unknown
  source: /note="Description of Unknown: Exemplary gene or splice site sequence"
uagguauggu

SEQ ID NO: 2551 - RNA, 10 nt, Unknown
  source: /note="Description of Unknown: Exemplary gene or splice site sequence"
uagguaugua

SEQ ID NO: 2552 - RNA, 10 nt, Unknown
  source: /note="Description of Unknown: Exemplary gene or splice site sequence"
uagguauguc

SEQ ID NO: 2553 - RNA, 10 nt, Unknown
  source: /note="Description of Unknown: Exemplary gene or splice site sequence"
uagguaugug

SEQ ID NO: 2554 - RNA, 10 nt, Unknown
  source: /note="Description of Unknown: Exemplary gene or splice site sequence"
uagguauguu

SEQ ID NO: 2555 - RNA, 10 nt, Unknown
  source: /note="Description of Unknown: Exemplary gene or splice site sequence"
uagguauuaa

SEQ ID NO: 2556 - RNA, 10 nt, Unknown
  source: /note="Description of Unknown: Exemplary gene or splice site sequence"
uagguauuac

SEQ ID NO: 2557 - RNA, 10 nt, Unknown
  source: /note="Description of Unknown: Exemplary gene or splice site sequence"
uagguauuau

SEQ ID NO: 2558 - RNA, 10 nt, Unknown
  source: /note="Description of Unknown: Exemplary gene or splice site sequence"
uagguauuca

SEQ ID NO: 2559 - RNA, 10 nt, Unknown
  source: /note="Description of Unknown: Exemplary gene or splice site sequence"
uagguauucc

SEQ ID NO: 2560 - RNA, 10 nt, Unknown
  source: /note="Description of Unknown: Exemplary gene or splice site sequence"
uagguauucu

SEQ ID NO: 2561 - RNA, 10 nt, Unknown
  source: /note="Description of Unknown: Exemplary gene or splice site sequence"
uagguauuga

SEQ ID NO: 2562 - RNA, 10 nt, Unknown
  source: /note="Description of Unknown: Exemplary gene or splice site sequence"
uagguauuua

SEQ ID NO: 2563 - RNA, 10 nt, Unknown
  source: /note="Description of Unknown: Exemplary gene or splice site sequence"
uagguauuuc

SEQ ID NO: 2564 - RNA, 10 nt, Unknown
  source: /note="Description of Unknown: Exemplary gene or splice site sequence"
uagguauuuu

SEQ ID NO: 2565 - RNA, 10 nt, Unknown
  source: /note="Description of Unknown: Exemplary gene or splice site sequence"
uaggucacuc

SEQ ID NO: 2566 - RNA, 10 nt, Unknown
  source: /note="Description of Unknown: Exemplary gene or splice site sequence"
uaggucagcu

SEQ ID NO: 2567 - RNA, 10 nt, Unknown
  source: /note="Description of Unknown: Exemplary gene or splice site sequence"
uaggucaggu

SEQ ID NO: 2568 - RNA, 10 nt, Unknown
  source: /note="Description of Unknown: Exemplary gene or splice site sequence"
uaggucagua

SEQ ID NO: 2569 - RNA, 10 nt, Unknown
  source: /note="Description of Unknown: Exemplary gene or splice site sequence"
uaggucagug

SEQ ID NO: 2570 - RNA, 10 nt, Unknown
  source: /note="Description of Unknown: Exemplary gene or splice site sequence"
uaggucaguu

SEQ ID NO: 2571 - RNA, 10 nt, Unknown
  source: /note="Description of Unknown: Exemplary gene or splice site sequence"
uaggucaucu

SEQ ID NO: 2572 - RNA, 10 nt, Unknown
  source: /note="Description of Unknown: Exemplary gene or splice site sequence"
uaggucauug

SEQ ID NO: 2573 - RNA, 10 nt, Unknown
  source: /note="Description of Unknown: Exemplary gene or splice site sequence"
uagguccaau

SEQ ID NO: 2574 - RNA, 10 nt, Unknown
  source: /note="Description of Unknown: Exemplary gene or splice site sequence"
uagguccugu

SEQ ID NO: 2575 - RNA, 10 nt, Unknown
  source: /note="Description of Unknown: Exemplary gene or splice site sequence"
uaggucucaa

SEQ ID NO: 2576 - RNA, 10 nt, Unknown
  source: /note="Description of Unknown: Exemplary gene or splice site sequence"
uaggucucgc

SEQ ID NO: 2577 - RNA, 10 nt, Unknown
  source: /note="Description of Unknown: Exemplary gene or splice site sequence"
uaggucuggc

SEQ ID NO: 2578 - RNA, 10 nt, Unknown
  source: /note="Description of Unknown: Exemplary gene or splice site sequence"
uaggucuguc

SEQ ID NO: 2579 - RNA, 10 nt, Unknown
  source: /note="Description of Unknown: Exemplary gene or splice site sequence"
uaggucugug

SEQ ID NO: 2580 - RNA, 10 nt, Unknown
  source: /note="Description of Unknown: Exemplary gene or splice site sequence"
uaggugaagu

SEQ ID NO: 2581 - RNA, 10 nt, Unknown
  source: /note="Description of Unknown: Exemplary gene or splice site sequence"
uaggugaaua

SEQ ID NO: 2582 - RNA, 10 nt, Unknown
  source: /note="Description of Unknown: Exemplary gene or splice site sequence"
uaggugaaug

SEQ ID NO: 2583 - RNA, 10 nt, Unknown
  source: /note="Description of Unknown: Exemplary gene or splice site sequence"
uaggugaauu

SEQ ID NO: 2584 - RNA, 10 nt, Unknown
  source: /note="Description of Unknown: Exemplary gene or splice site sequence"
uaggugacau

SEQ ID NO: 2585 - RNA, 10 nt, Unknown
  source: /note="Description of Unknown: Exemplary gene or splice site sequence"
uaggugacca

SEQ ID NO: 2586 - RNA, 10 nt, Unknown
  source: /note="Description of Unknown: Exemplary gene or splice site sequence"
uaggugacua

SEQ ID NO: 2587 - RNA, 10 nt, Unknown
  source: /note="Description of Unknown: Exemplary gene or splice site sequence"
uaggugagaa

SEQ ID NO: 2588 - RNA, 10 nt, Unknown
  source: /note="Description of Unknown: Exemplary gene or splice site sequence"
uaggugagac

SEQ ID NO: 2589 - RNA, 10 nt, Unknown
  source: /note="Description of Unknown: Exemplary gene or splice site sequence"
uaggugagag

SEQ ID NO: 2590 - RNA, 10 nt, Unknown
  source: /note="Description of Unknown: Exemplary gene or splice site sequence"
uaggugagau

SEQ ID NO: 2591 - RNA, 10 nt, Unknown
  source: /note="Description of Unknown: Exemplary gene or splice site sequence"
uaggugagcc

SEQ ID NO: 2592 - RNA, 10 nt, Unknown
  source: /note="Description of Unknown: Exemplary gene or splice site sequence"
uaggugagcu

SEQ ID NO: 2593 - RNA, 10 nt, Unknown
  source: /note="Description of Unknown: Exemplary gene or splice site sequence"
uaggugagga

SEQ ID NO: 2594 - RNA, 10 nt, Unknown
  source: /note="Description of Unknown: Exemplary gene or splice site sequence"
uaggugaggc

SEQ ID NO: 2595 - RNA, 10 nt, Unknown
  source: /note="Description of Unknown: Exemplary gene or splice site sequence"
uaggugaggu

SEQ ID NO: 2596 - RNA, 10 nt, Unknown
  source: /note="Description of Unknown: Exemplary gene or splice site sequence"
uaggugagua

SEQ ID NO: 2597 - RNA, 10 nt, Unknown
  source: /note="Description of Unknown: Exemplary gene or splice site sequence"
uaggugaguc

SEQ ID NO: 2598 - RNA, 10 nt, Unknown
  source: /note="Description of Unknown: Exemplary gene or splice site sequence"
uaggugagug

SEQ ID NO: 2599 - RNA, 10 nt, Unknown
  source: /note="Description of Unknown: Exemplary gene or splice site sequence"
uaggugauca

SEQ ID NO: 2600 - RNA, 10 nt, Unknown
  source: /note="Description of Unknown: Exemplary gene or splice site sequence"
uaggugauuc

SEQ ID NO: 2601 - RNA, 10 nt, Unknown
  source: /note="Description of Unknown: Exemplary gene or splice site sequence"
uaggugauuu

SEQ ID NO: 2602 - RNA, 10 nt, Unknown
  source: /note="Description of Unknown: Exemplary gene or splice site sequence"
uaggugcaua

SEQ ID NO: 2603 - RNA, 10 nt, Unknown
  source: /note="Description of Unknown: Exemplary gene or splice site sequence"
uaggugcauc

SEQ ID NO: 2604 - RNA, 10 nt, Unknown
  source: /note="Description of Unknown: Exemplary gene or splice site sequence"
uaggugccgu

SEQ ID NO: 2605 - RNA, 10 nt, Unknown
  source: /note="Description of Unknown: Exemplary gene or splice site sequence"
uaggugccug

SEQ ID NO: 2606 - RNA, 10 nt, Unknown
  source: /note="Description of Unknown: Exemplary gene or splice site sequence"
uaggugcgca

SEQ ID NO: 2607 - RNA, 10 nt, Unknown
  source: /note="Description of Unknown: Exemplary gene or splice site sequence"
uaggugcgua

SEQ ID NO: 2608 - RNA, 10 nt, Unknown
  source: /note="Description of Unknown: Exemplary gene or splice site sequence"
uaggugcgug

SEQ ID NO: 2609 - RNA, 10 nt, Unknown
  source: /note="Description of Unknown: Exemplary gene or splice site sequence"
uaggugcuga

SEQ ID NO: 2610 - RNA, 10 nt, Unknown
  source: /note="Description of Unknown: Exemplary gene or splice site sequence"
uagguggaua

SEQ ID NO: 2611 - RNA, 10 nt, Unknown
  source: /note="Description of Unknown: Exemplary gene or splice site sequence"
uaggugggaa

SEQ ID NO: 2612 - RNA, 10 nt, Unknown
  source: /note="Description of Unknown: Exemplary gene or splice site sequence"
uaggugggac

SEQ ID NO: 2613 - RNA, 10 nt, Unknown
  source: /note="Description of Unknown: Exemplary gene or splice site sequence"
uaggugggag

SEQ ID NO: 2614 - RNA, 10 nt, Unknown
  source: /note="Description of Unknown: Exemplary gene or splice site sequence"
uaggugggau

SEQ ID NO: 2615 - RNA, 10 nt, Unknown
  source: /note="Description of Unknown: Exemplary gene or splice site sequence"
uaggugggcc

SEQ ID NO: 2616 - RNA, 10 nt, Unknown
  source: /note="Description of Unknown: Exemplary gene or splice site sequence"
uaggugggcu

SEQ ID NO: 2617 - RNA, 10 nt, Unknown
  source: /note="Description of Unknown: Exemplary gene or splice site sequence"
uagguggguu

SEQ ID NO: 2618 - RNA, 10 nt, Unknown
  source: /note="Description of Unknown: Exemplary gene or splice site sequence"
uagguggugu

SEQ ID NO: 2619 - RNA, 10 nt, Unknown
  source: /note="Description of Unknown: Exemplary gene or splice site sequence"
uagguguaaa

SEQ ID NO: 2620 - RNA, 10 nt, Unknown
  source: /note="Description of Unknown: Exemplary gene or splice site sequence"
uaggugugaa

SEQ ID NO: 2621 - RNA, 10 nt, Unknown
  source: /note="Description of Unknown: Exemplary gene or splice site sequence"
uaggugugag

SEQ ID NO: 2622 - RNA, 10 nt, Unknown
  source: /note="Description of Unknown: Exemplary gene or splice site sequence"
uaggugugca

SEQ ID NO: 2623 - RNA, 10 nt, Unknown
  source: /note="Description of Unknown: Exemplary gene or splice site sequence"
uaggugugcc

SEQ ID NO: 2624 - RNA, 10 nt, Unknown
  source: /note="Description of Unknown: Exemplary gene or splice site sequence"
uaggugugcg

SEQ ID NO: 2625 - RNA, 10 nt, Unknown
  source: /note="Description of Unknown: Exemplary gene or splice site sequence"
uagguguggu

SEQ ID NO: 2626 - RNA, 10 nt, Unknown
  source: /note="Description of Unknown: Exemplary gene or splice site sequence"
uaggugugua

SEQ ID NO: 2627 - RNA, 10 nt, Unknown
  source: /note="Description of Unknown: Exemplary gene or splice site sequence"
uaggugugug

SEQ ID NO: 2628 - RNA, 10 nt, Unknown
  source: /note="Description of Unknown: Exemplary gene or splice site sequence"
uagguguugg

SEQ ID NO: 2629 - RNA, 10 nt, Unknown
  source: /note="Description of Unknown: Exemplary gene or splice site sequence"
uagguuaagc

SEQ ID NO: 2630 - RNA, 10 nt, Unknown
  source: /note="Description of Unknown: Exemplary gene or splice site sequence"
uagguuagac

SEQ ID NO: 2631 - RNA, 10 nt, Unknown
  source: /note="Description of Unknown: Exemplary gene or splice site sequence"
uagguuagcc

SEQ ID NO: 2632 - RNA, 10 nt, Unknown
  source: /note="Description of Unknown: Exemplary gene or splice site sequence"
uagguuaggc

SEQ ID NO: 2633 - RNA, 10 nt, Unknown
  source: /note="Description of Unknown: Exemplary gene or splice site sequence"
uagguuagua

SEQ ID NO: 2634 - RNA, 10 nt, Unknown
  source: /note="Description of Unknown: Exemplary gene or splice site sequence"
uagguuaguc

SEQ ID NO: 2635 - RNA, 10 nt, Unknown
  source: /note="Description of Unknown: Exemplary gene or splice site sequence"
uagguuagug

SEQ ID NO: 2636 - RNA, 10 nt, Unknown
  source: /note="Description of Unknown: Exemplary gene or splice site sequence"
uagguucccc

SEQ ID NO: 2637 - RNA, 10 nt, Unknown
  source: /note="Description of Unknown: Exemplary gene or splice site sequence"
uagguucuac

SEQ ID NO: 2638 - RNA, 10 nt, Unknown
  source: /note="Description of Unknown: Exemplary gene or splice site sequence"
uagguuggua

SEQ ID NO: 2639 - RNA, 10 nt, Unknown
  source: /note="Description of Unknown: Exemplary gene or splice site sequence"
uagguugguu

SEQ ID NO: 2640 - RNA, 10 nt, Unknown
  source: /note="Description of Unknown: Exemplary gene or splice site sequence"
uagguugucc

SEQ ID NO: 2641 - RNA, 10 nt, Unknown
  source: /note="Description of Unknown: Exemplary gene or splice site sequence"
uagguuuauu

SEQ ID NO: 2642 - RNA, 10 nt, Unknown
  source: /note="Description of Unknown: Exemplary gene or splice site sequence"
uagguuugcc

SEQ ID NO: 2643 - RNA, 10 nt, Unknown
  source: /note="Description of Unknown: Exemplary gene or splice site sequence"
uagguuugua

SEQ ID NO: 2644 - RNA, 10 nt, Unknown
  source: /note="Description of Unknown: Exemplary gene or splice site sequence"
uagguuuguc

SEQ ID NO: 2645 - RNA, 10 nt, Unknown
  source: /note="Description of Unknown: Exemplary gene or splice site sequence"
uagguuugug

SEQ ID NO: 2646 - RNA, 10 nt, Unknown
  source: /note="Description of Unknown: Exemplary gene or splice site sequence"
uagguuuguu

SEQ ID NO: 2647 - RNA, 10 nt, Unknown
  source: /note="Description of Unknown: Exemplary gene or splice site sequence"
uagguuuuuc

SEQ ID NO: 2648 - RNA, 10 nt, Unknown
  source: /note="Description of Unknown: Exemplary gene or splice site sequence"
uagguuuuug

SEQ ID NO: 2649 - RNA, 10 nt, Unknown
  source: /note="Description of Unknown: Exemplary gene or splice site sequence"
uauguaagaa

SEQ ID NO: 2650 - RNA, 10 nt, Unknown
  source: /note="Description of Unknown: Exemplary gene or splice site sequence"
uauguaagau

SEQ ID NO: 2651 - RNA, 10 nt, Unknown
  source: /note="Description of Unknown: Exemplary gene or splice site sequence"
uauguaagca

SEQ ID NO: 2652 - RNA, 10 nt, Unknown
  source: /note="Description of Unknown: Exemplary gene or splice site sequence"
uauguaagcc

SEQ ID NO: 2653 - RNA, 10 nt, Unknown
  source: /note="Description of Unknown: Exemplary gene or splice site sequence"
uauguaagua

SEQ ID NO: 2654 - RNA, 10 nt, Unknown
  source: /note="Description of Unknown: Exemplary gene or splice site sequence"
uauguaaguc

SEQ ID NO: 2655 - RNA, 10 nt, Unknown
  source: /note="Description of Unknown: Exemplary gene or splice site sequence"
uauguaagug

SEQ ID NO: 2656 - RNA, 10 nt, Unknown
  source: /note="Description of Unknown: Exemplary gene or splice site sequence"
uauguaaguu

SEQ ID NO: 2657 - RNA, 10 nt, Unknown
  source: /note="Description of Unknown: Exemplary gene or splice site sequence"
uauguacgug

SEQ ID NO: 2658 - RNA, 10 nt, Unknown
  source: /note="Description of Unknown: Exemplary gene or splice site sequence"
uauguacguu

SEQ ID NO: 2659 - RNA, 10 nt, Unknown
  source: /note="Description of Unknown: Exemplary gene or splice site sequence"
uauguagguc

SEQ ID NO: 2660 - RNA, 10 nt, Unknown
  source: /note="Description of Unknown: Exemplary gene or splice site sequence"
uauguagguu

SEQ ID NO: 2661 - RNA, 10 nt, Unknown
  source: /note="Description of Unknown: Exemplary gene or splice site sequence"
uauguauccu

SEQ ID NO: 2662 - RNA, 10 nt, Unknown
  source: /note="Description of Unknown: Exemplary gene or splice site sequence"
uauguaucuc

SEQ ID NO: 2663 - RNA, 10 nt, Unknown
  source: /note="Description of Unknown: Exemplary gene or splice site sequence"
uauguaugua

SEQ ID NO: 2664 - RNA, 10 nt, Unknown
  source: /note="Description of Unknown: Exemplary gene or splice site sequence"
uauguauguc

SEQ ID NO: 2665 - RNA, 10 nt, Unknown
  source: /note="Description of Unknown: Exemplary gene or splice site sequence"
uauguaugug

SEQ ID NO: 2666 - RNA, 10 nt, Unknown
  source: /note="Description of Unknown: Exemplary gene or splice site sequence"
uauguauuau

SEQ ID NO: 2667 - RNA, 10 nt, Unknown
  source: /note="Description of Unknown: Exemplary gene or splice site sequence"
uaugucagaa

SEQ ID NO: 2668 - RNA, 10 nt, Unknown
  source: /note="Description of Unknown: Exemplary gene or splice site sequence"
uaugucugua

SEQ ID NO: 2669 - RNA, 10 nt, Unknown
  source: /note="Description of Unknown: Exemplary gene or splice site sequence"
uaugugaaua

SEQ ID NO: 2670 - RNA, 10 nt, Unknown
  source: /note="Description of Unknown: Exemplary gene or splice site sequence"
uaugugacag

SEQ ID NO: 2671 - RNA, 10 nt, Unknown
  source: /note="Description of Unknown: Exemplary gene or splice site sequence"
uaugugagua

SEQ ID NO: 2672 - RNA, 10 nt, Unknown
  source: /note="Description of Unknown: Exemplary gene or splice site sequence"
uaugugagug

SEQ ID NO: 2673 - RNA, 10 nt, Unknown
  source: /note="Description of Unknown: Exemplary gene or splice site sequence"
uaugugaguu

SEQ ID NO: 2674 - RNA, 10 nt, Unknown
  source: /note="Description of Unknown: Exemplary gene or splice site sequence"
uaugugggca

SEQ ID NO: 2675 - RNA, 10 nt, Unknown
  source: /note="Description of Unknown: Exemplary gene or splice site sequence"
uaugugugua

SEQ ID NO: 2676 - RNA, 10 nt, Unknown
  source: /note="Description of Unknown: Exemplary gene or splice site sequence"
uauguguuua

SEQ ID NO: 2677 - RNA, 10 nt, Unknown
  source: /note="Description of Unknown: Exemplary gene or splice site sequence"
uauguuuugu

SEQ ID NO: 2678 - RNA, 10 nt, Unknown
  source: /note="Description of Unknown: Exemplary gene or splice site sequence"
ucagcgacau

SEQ ID NO: 2679 - RNA, 10 nt, Unknown
  source: /note="Description of Unknown: Exemplary gene or splice site sequence"
ucaguaaaau

SEQ ID NO: 2680 - RNA, 10 nt, Unknown
  source: /note="Description of Unknown: Exemplary gene or splice site sequence"
ucaguaaaua

SEQ ID NO: 2681 - RNA, 10 nt, Unknown
  source: /note="Description of Unknown: Exemplary gene or splice site sequence"
ucaguaacug

SEQ ID NO: 2682 - RNA, 10 nt, Unknown
  source: /note="Description of Unknown: Exemplary gene or splice site sequence"
ucaguaagaa

SEQ ID NO: 2683 - RNA, 10 nt, Unknown
  source: /note="Description of Unknown: Exemplary gene or splice site sequence"
ucaguaagag

SEQ ID NO: 2684 - RNA, 10 nt, Unknown
  source: /note="Description of Unknown: Exemplary gene or splice site sequence"
ucaguaagau

SEQ ID NO: 2685 - RNA, 10 nt, Unknown
  source: /note="Description of Unknown: Exemplary gene or splice site sequence"
ucaguaagca

SEQ ID NO: 2686 - RNA, 10 nt, Unknown
  source: /note="Description of Unknown: Exemplary gene or splice site sequence"
ucaguaagcc

SEQ ID NO: 2687 - RNA, 10 nt, Unknown
  source: /note="Description of Unknown: Exemplary gene or splice site sequence"
ucaguaagcu

SEQ ID NO: 2688 - RNA, 10 nt, Unknown
  source: /note="Description of Unknown: Exemplary gene or splice site sequence"
ucaguaaggg

SEQ ID NO: 2689 - RNA, 10 nt, Unknown
  source: /note="Description of Unknown: Exemplary gene or splice site sequence"
ucaguaagua

SEQ ID NO: 2690 - RNA, 10 nt, Unknown
  source: /note="Description of Unknown: Exemplary gene or splice site sequence"
ucaguaaguc

SEQ ID NO: 2691 - RNA, 10 nt, Unknown
  source: /note="Description of Unknown: Exemplary gene or splice site sequence"
ucaguaagug

SEQ ID NO: 2692 - RNA, 10 nt, Unknown
  source: /note="Description of Unknown: Exemplary gene or splice site sequence"
ucaguaaguu

SEQ ID NO: 2693 - RNA, 10 nt, Unknown
  source: /note="Description of Unknown: Exemplary gene or splice site sequence"
ucaguaucuu

SEQ ID NO: 2694 - RNA, 10 nt, Unknown
  source: /note="Description of Unknown: Exemplary gene or splice site sequence"
ucaguaugga

SEQ ID NO: 2695 - RNA, 10 nt, Unknown
  source: /note="Description of Unknown: Exemplary gene or splice site sequence"
ucaguauggu

SEQ ID NO: 2696 - RNA, 10 nt, Unknown
  source: /note="Description of Unknown: Exemplary gene or splice site sequence"
ucagucccca

SEQ ID NO: 2697 - RNA, 10 nt, Unknown
  source: /note="Description of Unknown: Exemplary gene or splice site sequence"
ucagugagca

SEQ ID NO: 2698 - RNA, 10 nt, Unknown
  source: /note="Description of Unknown: Exemplary gene or splice site sequence"
ucagugagcu

SEQ ID NO: 2699 - RNA, 10 nt, Unknown
  source: /note="Description of Unknown: Exemplary gene or splice site sequence"
ucagugagua

SEQ ID NO: 2700 - RNA, 10 nt, Unknown
  source: /note="Description of Unknown: Exemplary gene or splice site sequence"
ucagugagug

SEQ ID NO: 2701 - RNA, 10 nt, Unknown
  source: /note="Description of Unknown: Exemplary gene or splice site sequence"
ucagugaguu

SEQ ID NO: 2702 - RNA, 10 nt, Unknown
  source: /note="Description of Unknown: Exemplary gene or splice site sequence"
ucagugauug

SEQ ID NO: 2703 - RNA, 10 nt, Unknown
  source: /note="Description of Unknown: Exemplary gene or splice site sequence"
ucagugggug

SEQ ID NO: 2704 - RNA, 10 nt, Unknown
  source: /note="Description of Unknown: Exemplary gene or splice site sequence"
ucaguugagc

SEQ ID NO: 2705 - RNA, 10 nt, Unknown
  source: /note="Description of Unknown: Exemplary gene or splice site sequence"
ucaguugauu

SEQ ID NO: 2706 - RNA, 10 nt, Unknown
  source: /note="Description of Unknown: Exemplary gene or splice site sequence"
ucaguuuagu

SEQ ID NO: 2707 - RNA, 10 nt, Unknown
  source: /note="Description of Unknown: Exemplary gene or splice site sequence"
uccguaagca

SEQ ID NO: 2708 - RNA, 10 nt, Unknown
  source: /note="Description of Unknown: Exemplary gene or splice site sequence"
uccguaagcu

SEQ ID NO: 2709 - RNA, 10 nt, Unknown
  source: /note="Description of Unknown: Exemplary gene or splice site sequence"
uccguaaguc

SEQ ID NO: 2710 - RNA, 10 nt, Unknown
  source: /note="Description of Unknown: Exemplary gene or splice site sequence"
uccguaagug

SEQ ID NO: 2711 - RNA, 10 nt, Unknown
  source: /note="Description of Unknown: Exemplary gene or splice site sequence"
uccguaauag

SEQ ID NO: 2712 - RNA, 10 nt, Unknown
  source: /note="Description of Unknown: Exemplary gene or splice site sequence"
uccguacuua

SEQ ID NO: 2713 - RNA, 10 nt, Unknown
  source: /note="Description of Unknown: Exemplary gene or splice site sequence"
uccguaugua

SEQ ID NO: 2714 - RNA, 10 nt, Unknown
  source: /note="Description of Unknown: Exemplary gene or splice site sequence"
uccguauguu

SEQ ID NO: 2715 - RNA, 10 nt, Unknown
  source: /note="Description of Unknown: Exemplary gene or splice site sequence"
uccgugagau

SEQ ID NO: 2716 - RNA, 10 nt, Unknown
  source: /note="Description of Unknown: Exemplary gene or splice site sequence"
uccgugaguc

SEQ ID NO: 2717 - RNA, 10 nt, Unknown
  source: /note="Description of Unknown: Exemplary gene or splice site sequence"
ucgguaaauu

SEQ ID NO: 2718 - RNA, 10 nt, Unknown
  source: /note="Description of Unknown: Exemplary gene or splice site sequence"
ucgguaagag

SEQ ID NO: 2719 - RNA, 10 nt, Unknown
  source: /note="Description of Unknown: Exemplary gene or splice site sequence"
ucgguaagcu

SEQ ID NO: 2720 - RNA, 10 nt, Unknown
  source: /note="Description of Unknown: Exemplary gene or splice site sequence"
ucgguacauc

SEQ ID NO: 2721 - RNA, 10 nt, Unknown
  source: /note="Description of Unknown: Exemplary gene or splice site sequence"
ucgguacucc

SEQ ID NO: 2722 - RNA, 10 nt, Unknown
  source: /note="Description of Unknown: Exemplary gene or splice site sequence"
ucgguagacc

SEQ ID NO: 2723 - RNA, 10 nt, Unknown
  source: /note="Description of Unknown: Exemplary gene or splice site sequence"
ucgguagguu

SEQ ID NO: 2724 - RNA, 10 nt, Unknown
  source: /note="Description of Unknown: Exemplary gene or splice site sequence"
ucgguaguaa

SEQ ID NO: 2725 - RNA, 10 nt, Unknown
  source: /note="Description of Unknown: Exemplary gene or splice site sequence"
ucgguaugug

SEQ ID NO: 2726 - RNA, 10 nt, Unknown
  source: /note="Description of Unknown: Exemplary gene or splice site sequence"
ucgguauguu

SEQ ID NO: 2727 - RNA, 10 nt, Unknown
  source: /note="Description of Unknown: Exemplary gene or splice site sequence"
ucgguauuga

SEQ ID NO: 2728 - RNA, 10 nt, Unknown
  source: /note="Description of Unknown: Exemplary gene or splice site sequence"
ucggucagua

SEQ ID NO: 2729 - RNA, 10 nt, Unknown
  source: /note="Description of Unknown: Exemplary gene or splice site sequence"
ucggucuuag

SEQ ID NO: 2730 - RNA, 10 nt, Unknown
  source: /note="Description of Unknown: Exemplary gene or splice site sequence"
ucggugaagu

SEQ ID NO: 2731 - RNA, 10 nt, Unknown
  source: /note="Description of Unknown: Exemplary gene or splice site sequence"
ucggugagaa

SEQ ID NO: 2732 - RNA, 10 nt, Unknown
  source: /note="Description of Unknown: Exemplary gene or splice site sequence"
ucggugagca

SEQ ID NO: 2733 - RNA, 10 nt, Unknown
  source: /note="Description of Unknown: Exemplary gene or splice site sequence"
ucggugaggc

SEQ ID NO: 2734 - RNA, 10 nt, Unknown
  source: /note="Description of Unknown: Exemplary gene or splice site sequence"
ucggugagua

SEQ ID NO: 2735 - RNA, 10 nt, Unknown
  source: /note="Description of Unknown: Exemplary gene or splice site sequence"
ucggugcgcu

SEQ ID NO: 2736 - RNA, 10 nt, Unknown
  source: /note="Description of Unknown: Exemplary gene or splice site sequence"
ucggugcuuu

SEQ ID NO: 2737 - RNA, 10 nt, Unknown
  source: /note="Description of Unknown: Exemplary gene or splice site sequence"
ucggugguuu

SEQ ID NO: 2738 - RNA, 10 nt, Unknown
  source: /note="Description of Unknown: Exemplary gene or splice site sequence"
ucgguuagcu

SEQ ID NO: 2739 - RNA, 10 nt, Unknown
  source: /note="Description of Unknown: Exemplary gene or splice site sequence"
ucuguaaaag

SEQ ID NO: 2740 - RNA, 10 nt, Unknown
  source: /note="Description of Unknown: Exemplary gene or splice site sequence"
ucuguaagaa

SEQ ID NO: 2741 - RNA, 10 nt, Unknown
  source: /note="Description of Unknown: Exemplary gene or splice site sequence"
ucuguaagau

SEQ ID NO: 2742 - RNA, 10 nt, Unknown
  source: /note="Description of Unknown: Exemplary gene or splice site sequence"
ucuguaagca

SEQ ID NO: 2743 - RNA, 10 nt, Unknown
  source: /note="Description of Unknown: Exemplary gene or splice site sequence"
ucuguaagcu

SEQ ID NO: 2744 - RNA, 10 nt, Unknown
  source: /note="Description of Unknown: Exemplary gene or splice site sequence"
ucuguaagua

SEQ ID NO: 2745 - RNA, 10 nt, Unknown
  source: /note="Description of Unknown: Exemplary gene or splice site sequence"
ucuguaaguc

SEQ ID NO: 2746 - RNA, 10 nt, Unknown
  source: /note="Description of Unknown: Exemplary gene or splice site sequence"
ucuguaagug

SEQ ID NO: 2747 - RNA, 10 nt, Unknown
  source: /note="Description of Unknown: Exemplary gene or splice site sequence"
ucuguaaguu

SEQ ID NO: 2748 - RNA, 10 nt, Unknown
  source: /note="Description of Unknown: Exemplary gene or splice site sequence"
ucuguaauaa

SEQ ID NO: 2749 - RNA, 10 nt, Unknown
  source: /note="Description of Unknown: Exemplary gene or splice site sequence"
ucuguaauga

SEQ ID NO: 2750 - RNA, 10 nt, Unknown
  source: /note="Description of Unknown: Exemplary gene or splice site sequence"
ucuguaaugu

SEQ ID NO: 2751 - RNA, 10 nt, Unknown
  source: /note="Description of Unknown: Exemplary gene or splice site sequence"
ucuguaggua

SEQ ID NO: 2752 - RNA, 10 nt, Unknown
  source: /note="Description of Unknown: Exemplary gene or splice site sequence"
ucuguagguu

SEQ ID NO: 2753 - RNA, 10 nt, Unknown
  source: /note="Description of Unknown: Exemplary gene or splice site sequence"
ucuguauaua

SEQ ID NO: 2754 - RNA, 10 nt, Unknown
  source: /note="Description of Unknown: Exemplary gene or splice site sequence"
ucuguaugac

SEQ ID NO: 2755 - RNA, 10 nt, Unknown
  source: /note="Description of Unknown: Exemplary gene or splice site sequence"
ucuguaugua

SEQ ID NO: 2756 - RNA, 10 nt, Unknown
  source: /note="Description of Unknown: Exemplary gene or splice site sequence"
ucuguccucg

SEQ ID NO: 2757 - RNA, 10 nt, Unknown
  source: /note="Description of Unknown: Exemplary gene or splice site sequence"
ucugugagag

SEQ ID NO: 2758 - RNA, 10 nt, Unknown
  source: /note="Description of Unknown: Exemplary gene or splice site sequence"
ucugugagcu

SEQ ID NO: 2759 - RNA, 10 nt, Unknown
  source: /note="Description of Unknown: Exemplary gene or splice site sequence"
ucugugagga

SEQ ID NO: 2760 - RNA, 10 nt, Unknown
  source: /note="Description of Unknown: Exemplary gene or splice site sequence"
ucugugagua

SEQ ID NO: 2761 - RNA, 10 nt, Unknown
  source: /note="Description of Unknown: Exemplary gene or splice site sequence"
ucugugaguc

SEQ ID NO: 2762 - RNA, 10 nt, Unknown
  source: /note="Description of Unknown: Exemplary gene or splice site sequence"
ucugugagug

SEQ ID NO: 2763 - RNA, 10 nt, Unknown
  source: /note="Description of Unknown: Exemplary gene or splice site sequence"
ucugugaguu

SEQ ID NO: 2764 - RNA, 10 nt, Unknown
  source: /note="Description of Unknown: Exemplary gene or splice site sequence"
ucugugcgua

SEQ ID NO: 2765 - RNA, 10 nt, Unknown
  source: /note="Description of Unknown: Exemplary gene or splice site sequence"
ucugugugag

SEQ ID NO: 2766 - RNA, 10 nt, Unknown
  source: /note="Description of Unknown: Exemplary gene or splice site sequence"
ugaguaacuu

SEQ ID NO: 2767 - RNA, 10 nt, Unknown
  source: /note="Description of Unknown: Exemplary gene or splice site sequence"
ugaguaagau

SEQ ID NO: 2768 - RNA, 10 nt, Unknown
  source: /note="Description of Unknown: Exemplary gene or splice site sequence"
ugaguaagca

SEQ ID NO: 2769 - RNA, 10 nt, Unknown
  source: /note="Description of Unknown: Exemplary gene or splice site sequence"
ugaguaagcu

SEQ ID NO: 2770 - RNA, 10 nt, Unknown
  source: /note="Description of Unknown: Exemplary gene or splice site sequence"
ugaguaaggc

SEQ ID NO: 2771 - RNA, 10 nt, Unknown
  source: /note="Description of Unknown: Exemplary gene or splice site sequence"
ugaguaaggu

SEQ ID NO: 2772 - RNA, 10 nt, Unknown
  source: /note="Description of Unknown: Exemplary gene or splice site sequence"
ugaguaagua

SEQ ID NO: 2773 - RNA, 10 nt, Unknown
  source: /note="Description of Unknown: Exemplary gene or splice site sequence"
ugaguaaguc

SEQ ID NO: 2774 - RNA, 10 nt, Unknown
  source: /note="Description of Unknown: Exemplary gene or splice site sequence"
ugaguaagug

SEQ ID NO: 2775 - RNA, 10 nt, Unknown
  source: /note="Description of Unknown: Exemplary gene or splice site sequence"
ugaguaaguu

SEQ ID NO: 2776 - RNA, 10 nt, Unknown
  source: /note="Description of Unknown: Exemplary gene or splice site sequence"
ugaguaaucc

SEQ ID NO: 2777 - RNA, 10 nt, Unknown
  source: /note="Description of Unknown: Exemplary gene or splice site sequence"
ugaguaauua

SEQ ID NO: 2778 - RNA, 10 nt, Unknown
  source: /note="Description of Unknown: Exemplary gene or splice site sequence"
ugaguacagu

SEQ ID NO: 2779 - RNA, 10 nt, Unknown
  source: /note="Description of Unknown: Exemplary gene or splice site sequence"
ugaguacgua

SEQ ID NO: 2780 - RNA, 10 nt, Unknown
  source: /note="Description of Unknown: Exemplary gene or splice site sequence"
ugaguacguu

SEQ ID NO: 2781 - RNA, 10 nt, Unknown
  source: /note="Description of Unknown: Exemplary gene or splice site sequence"
ugaguacugu

SEQ ID NO: 2782 - RNA, 10 nt, Unknown
  source: /note="Description of Unknown: Exemplary gene or splice site sequence"
ugaguagcug

SEQ ID NO: 2783 - RNA, 10 nt, Unknown
  source: /note="Description of Unknown: Exemplary gene or splice site sequence"
ugaguaggua

SEQ ID NO: 2784 - RNA, 10 nt, Unknown
  source: /note="Description of Unknown: Exemplary gene or splice site sequence"
ugaguauaaa

SEQ ID NO: 2785 - RNA, 10 nt, Unknown
  source: /note="Description of Unknown: Exemplary gene or splice site sequence"
ugaguaugcu

SEQ ID NO: 2786 - RNA, 10 nt, Unknown
  source: /note="Description of Unknown: Exemplary gene or splice site sequence"
ugaguaugga

SEQ ID NO: 2787 - RNA, 10 nt, Unknown
  source: /note="Description of Unknown: Exemplary gene or splice site sequence"
ugaguaugua

SEQ ID NO: 2788 - RNA, 10 nt, Unknown
  source: /note="Description of Unknown: Exemplary gene or splice site sequence"
ugaguauguc

SEQ ID NO: 2789 - RNA, 10 nt, Unknown
  source: /note="Description of Unknown: Exemplary gene or splice site sequence"
ugaguauguu

SEQ ID NO: 2790 - RNA, 10 nt, Unknown
  source: /note="Description of Unknown: Exemplary gene or splice site sequence"
ugagucagag

SEQ ID NO: 2791 - RNA, 10 nt, Unknown
  source: /note="Description of Unknown: Exemplary gene or splice site sequence"
ugagucuacg

SEQ ID NO: 2792 - RNA, 10 nt, Unknown
  source: /note="Description of Unknown: Exemplary gene or splice site sequence"
ugagugaaua

SEQ ID NO: 2793 - RNA, 10 nt, Unknown
  source: /note="Description of Unknown: Exemplary gene or splice site sequence"
ugagugaauu

SEQ ID NO: 2794 - RNA, 10 nt, Unknown
  source: /note="Description of Unknown: Exemplary gene or splice site sequence"
ugagugagaa

SEQ ID NO: 2795 - RNA, 10 nt, Unknown
  source: /note="Description of Unknown: Exemplary gene or splice site sequence"
ugagugagau

SEQ ID NO: 2796 - RNA, 10 nt, Unknown
  source: /note="Description of Unknown: Exemplary gene or splice site sequence"
ugagugagca

SEQ ID NO: 2797 - RNA, 10 nt, Unknown
  source: /note="Description of Unknown: Exemplary gene or splice site sequence"
ugagugagcc

SEQ ID NO: 2798 - RNA, 10 nt, Unknown
  source: /note="Description of Unknown: Exemplary gene or splice site sequence"
ugagugagga

SEQ ID NO: 2799 - RNA, 10 nt, Unknown
  source: /note="Description of Unknown: Exemplary gene or splice site sequence"
ugagugagua

SEQ ID NO: 2800 - RNA, 10 nt, Unknown
  source: /note="Description of Unknown: Exemplary gene or splice site sequence"
ugagugagug

SEQ ID NO: 2801 - RNA, 10 nt, Unknown
  source: /note="Description of Unknown: Exemplary gene or splice site sequence"
ugagugaguu

SEQ ID NO: 2802 - RNA, 10 nt, Unknown
  source: /note="Description of Unknown: Exemplary gene or splice site sequence"
ugagugggaa

SEQ ID NO: 2803 - RNA, 10 nt, Unknown
  source: /note="Description of Unknown: Exemplary gene or splice site sequence"
ugaguuaaga

SEQ ID NO: 2804 - RNA, 10 nt, Unknown
  source: /note="Description of Unknown: Exemplary gene or splice site sequence"
ugaguuaaug

SEQ ID NO: 2805 - RNA, 10 nt, Unknown
  source: /note="Description of Unknown: Exemplary gene or splice site sequence"
ugaguuacgg

SEQ ID NO: 2806 - RNA, 10 nt, Unknown
  source: /note="Description of Unknown: Exemplary gene or splice site sequence"
ugaguuaggu

SEQ ID NO: 2807 - RNA, 10 nt, Unknown
  source: /note="Description of Unknown: Exemplary gene or splice site sequence"
ugaguucuau

SEQ ID NO: 2808 - RNA, 10 nt, Unknown
  source: /note="Description of Unknown: Exemplary gene or splice site sequence"
ugaguugguu

SEQ ID NO: 2809 - RNA, 10 nt, Unknown
  source: /note="Description of Unknown: Exemplary gene or splice site sequence"
ugaguuguag

SEQ ID NO: 2810 - RNA, 10 nt, Unknown
  source: /note="Description of Unknown: Exemplary gene or splice site sequence"
ugaguuuauc

SEQ ID NO: 2811 - RNA, 10 nt, Unknown
  source: /note="Description of Unknown: Exemplary gene or splice site sequence"
ugcguaaguc

SEQ ID NO: 2812 - RNA, 10 nt, Unknown
  source: /note="Description of Unknown: Exemplary gene or splice site sequence"
ugcguaagug

SEQ ID NO: 2813 - RNA, 10 nt, Unknown
  source: /note="Description of Unknown: Exemplary gene or splice site sequence"
ugcguacggc

SEQ ID NO: 2814 - RNA, 10 nt, Unknown
  source: /note="Description of Unknown: Exemplary gene or splice site sequence"
ugcguacggg

SEQ ID NO: 2815 - RNA, 10 nt, Unknown
  source: /note="Description of Unknown: Exemplary gene or splice site sequence"
ugcguaugua

SEQ ID NO: 2816 - RNA, 10 nt, Unknown
  source: /note="Description of Unknown: Exemplary gene or splice site sequence"
ugggcaaguc

SEQ ID NO: 2817 - RNA, 10 nt, Unknown
  source: /note="Description of Unknown: Exemplary gene or splice site sequence"
ugggcaagug

SEQ ID NO: 2818 - RNA, 10 nt, Unknown
  source: /note="Description of Unknown: Exemplary gene or splice site sequence"
ugggcacauc

SEQ ID NO: 2819 - RNA, 10 nt, Unknown
  source: /note="Description of Unknown: Exemplary gene or splice site sequence"
ugggccacgu

SEQ ID NO: 2820 - RNA, 10 nt, Unknown
  source: /note="Description of Unknown: Exemplary gene or splice site sequence"
ugggccccgg

SEQ ID NO: 2821 - RNA, 10 nt, Unknown
  source: /note="Description of Unknown: Exemplary gene or splice site sequence"
uggguaaaau

SEQ ID NO: 2822 - RNA, 10 nt, Unknown
  source: /note="Description of Unknown: Exemplary gene or splice site sequence"
uggguaaagc

SEQ ID NO: 2823 - RNA, 10 nt, Unknown
  source: /note="Description of Unknown: Exemplary gene or splice site sequence"
uggguaaagg

SEQ ID NO: 2824 - RNA, 10 nt, Unknown
  source: /note="Description of Unknown: Exemplary gene or splice site sequence"
uggguaaagu

SEQ ID NO: 2825 - RNA, 10 nt, Unknown
  source: /note="Description of Unknown: Exemplary gene or splice site sequence"
uggguaaaua

SEQ ID NO: 2826 - RNA, 10 nt, Unknown
  source: /note="Description of Unknown: Exemplary gene or splice site sequence"
uggguaaaug

SEQ ID NO: 2827 - RNA, 10 nt, Unknown
  source: /note="Description of Unknown: Exemplary gene or splice site sequence"
uggguaaauu

SEQ ID NO: 2828 - RNA, 10 nt, Unknown
  source: /note="Description of Unknown: Exemplary gene or splice site sequence"
uggguaacag

SEQ ID NO: 2829 - RNA, 10 nt, Unknown
  source: /note="Description of Unknown: Exemplary gene or splice site sequence"
uggguaacau

SEQ ID NO: 2830 - RNA, 10 nt, Unknown
  source: /note="Description of Unknown: Exemplary gene or splice site sequence"
uggguaacua

SEQ ID NO: 2831 - RNA, 10 nt, Unknown
  source: /note="Description of Unknown: Exemplary gene or splice site sequence"
uggguaacuu

SEQ ID NO: 2832 - RNA, 10 nt, Unknown
  source: /note="Description of Unknown: Exemplary gene or splice site sequence"
uggguaagaa

SEQ ID NO: 2833 - RNA, 10 nt, Unknown
  source: /note="Description of Unknown: Exemplary gene or splice site sequence"
uggguaagac

SEQ ID NO: 2834 - RNA, 10 nt, Unknown
  source: /note="Description of Unknown: Exemplary gene or splice site sequence"
uggguaagag

SEQ ID NO: 2835 - RNA, 10 nt, Unknown
  source: /note="Description of Unknown: Exemplary gene or splice site sequence"
uggguaagau

SEQ ID NO: 2836 - RNA, 10 nt, Unknown
  source: /note="Description of Unknown: Exemplary gene or splice site sequence"
uggguaagca

SEQ ID NO: 2837 - RNA, 10 nt, Unknown
  source: /note="Description of Unknown: Exemplary gene or splice site sequence"
uggguaagcc

SEQ ID NO: 2838 - RNA, 10 nt, Unknown
  source: /note="Description of Unknown: Exemplary gene or splice site sequence"
uggguaagcu

SEQ ID NO: 2839 - RNA, 10 nt, Unknown
  source: /note="Description of Unknown: Exemplary gene or splice site sequence"
uggguaaggg

SEQ ID NO: 2840 - RNA, 10 nt, Unknown
  source: /note="Description of Unknown: Exemplary gene or splice site sequence"
uggguaaggu

SEQ ID NO: 2841 - RNA, 10 nt, Unknown
  source: /note="Description of Unknown: Exemplary gene or splice site sequence"
uggguaagua

SEQ ID NO: 2842 - RNA, 10 nt, Unknown
  source: /note="Description of Unknown: Exemplary gene or splice site sequence"
uggguaaguc

SEQ ID NO: 2843 - RNA, 10 nt, Unknown
  source: /note="Description of Unknown: Exemplary gene or splice site sequence"
uggguaagug

SEQ ID NO: 2844 - RNA, 10 nt, Unknown
  source: /note="Description of Unknown: Exemplary gene or splice site sequence"
uggguaaguu

SEQ ID NO: 2845 - RNA, 10 nt, Unknown
  source: /note="Description of Unknown: Exemplary gene or splice site sequence"
uggguaaugu

SEQ ID NO: 2846 - RNA, 10 nt, Unknown
  source: /note="Description of Unknown: Exemplary gene or splice site sequence"
uggguaauua

SEQ ID NO: 2847 - RNA, 10 nt, Unknown
  source: /note="Description of Unknown: Exemplary gene or splice site sequence"
uggguaauuu

SEQ ID NO: 2848 - RNA, 10 nt, Unknown
  source: /note="Description of Unknown: Exemplary gene or splice site sequence"
uggguacaaa

SEQ ID NO: 2849 - RNA, 10 nt, Unknown
  source: /note="Description of Unknown: Exemplary gene or splice site sequence"
uggguacagu

SEQ ID NO: 2850 - RNA, 10 nt, Unknown
  source: /note="Description of Unknown: Exemplary gene or splice site sequence"
uggguacuac

SEQ ID NO: 2851 - RNA, 10 nt, Unknown
  source: /note="Description of Unknown: Exemplary gene or splice site sequence"
uggguaggga

SEQ ID NO: 2852 - RNA, 10 nt, Unknown
  source: /note="Description of Unknown: Exemplary gene or splice site sequence"
uggguagguc

SEQ ID NO: 2853 - RNA, 10 nt, Unknown
  source: /note="Description of Unknown: Exemplary gene or splice site sequence"
uggguaggug

SEQ ID NO: 2854 - RNA, 10 nt, Unknown
  source: /note="Description of Unknown: Exemplary gene or splice site sequence"
uggguagguu

SEQ ID NO: 2855 - RNA, 10 nt, Unknown
  source: /note="Description of Unknown: Exemplary gene or splice site sequence"
uggguaguua

SEQ ID NO: 2856 - RNA, 10 nt, Unknown
  source: /note="Description of Unknown: Exemplary gene or splice site sequence"
uggguauagu

SEQ ID NO: 2857 - RNA, 10 nt, Unknown
  source: /note="Description of Unknown: Exemplary gene or splice site sequence"
uggguaugaa

SEQ ID NO: 2858 - RNA, 10 nt, Unknown
  source: /note="Description of Unknown: Exemplary gene or splice site sequence"
uggguaugac

SEQ ID NO: 2859 - RNA, 10 nt, Unknown
  source: /note="Description of Unknown: Exemplary gene or splice site sequence"
uggguaugag

SEQ ID NO: 2860 - RNA, 10 nt, Unknown
  source: /note="Description of Unknown: Exemplary gene or splice site sequence"
uggguaugua

SEQ ID NO: 2861 - RNA, 10 nt, Unknown
  source: /note="Description of Unknown: Exemplary gene or splice site sequence"
uggguauguc

SEQ ID NO: 2862 - RNA, 10 nt, Unknown
  source: /note="Description of Unknown: Exemplary gene or splice site sequence"
uggguaugug

SEQ ID NO: 2863 - RNA, 10 nt, Unknown
  source: /note="Description of Unknown: Exemplary gene or splice site sequence"
uggguauguu

SEQ ID NO: 2864 - RNA, 10 nt, Unknown
  source: /note="Description of Unknown: Exemplary gene or splice site sequence"
uggguauuug

SEQ ID NO: 2865 - RNA, 10 nt, Unknown
  source: /note="Description of Unknown: Exemplary gene or splice site sequence"
ugggucuuug

SEQ ID NO: 2866 - RNA, 10 nt, Unknown
  source: /note="Description of Unknown: Exemplary gene or splice site sequence"
ugggugaccu

SEQ ID NO: 2867 - RNA, 10 nt, Unknown
  source: /note="Description of Unknown: Exemplary gene or splice site sequence"
ugggugacua

SEQ ID NO: 2868 - RNA, 10 nt, Unknown
  source: /note="Description of Unknown: Exemplary gene or splice site sequence"
ugggugagac

SEQ ID NO: 2869 - RNA, 10 nt, Unknown
  source: /note="Description of Unknown: Exemplary gene or splice site sequence"
ugggugagag

SEQ ID NO: 2870 - RNA, 10 nt, Unknown
  source: /note="Description of Unknown: Exemplary gene or splice site sequence"
ugggugagca

SEQ ID NO: 2871 - RNA, 10 nt, Unknown
  source: /note="Description of Unknown: Exemplary gene or splice site sequence"
ugggugagcc

SEQ ID NO: 2872 - RNA, 10 nt, Unknown
  source: /note="Description of Unknown: Exemplary gene or splice site sequence"
ugggugagga

SEQ ID NO: 2873 - RNA, 10 nt, Unknown
  source: /note="Description of Unknown: Exemplary gene or splice site sequence"
ugggugaggc

SEQ ID NO: 2874 - RNA, 10 nt, Unknown
  source: /note="Description of Unknown: Exemplary gene or splice site sequence"
ugggugaggg

SEQ ID NO: 2875 - RNA, 10 nt, Unknown
  source: /note="Description of Unknown: Exemplary gene or splice site sequence"
ugggugagua

SEQ ID NO: 2876 - RNA, 10 nt, Unknown
  source: /note="Description of Unknown: Exemplary gene or splice site sequence"
ugggugaguc

SEQ ID NO: 2877 - RNA, 10 nt, Unknown
  source: /note="Description of Unknown: Exemplary gene or splice site sequence"
ugggugagug

SEQ ID NO: 2878 - RNA, 10 nt, Unknown
  source: /note="Description of Unknown: Exemplary gene or splice site sequence"
ugggugaguu

SEQ ID NO: 2879 - RNA, 10 nt, Unknown
  source: /note="Description of Unknown: Exemplary gene or splice site sequence"
ugggugcgug

SEQ ID NO: 2880 - RNA, 10 nt, Unknown
  source: /note="Description of Unknown: Exemplary gene or splice site sequence"
uggguggagg

SEQ ID NO: 2881 - RNA, 10 nt, Unknown
  source: /note="Description of Unknown: Exemplary gene or splice site sequence"
uggguggcuu

SEQ ID NO: 2882 - RNA, 10 nt, Unknown
  source: /note="Description of Unknown: Exemplary gene or splice site sequence"
uggguggggg

SEQ ID NO: 2883 - RNA, 10 nt, Unknown
  source: /note="Description of Unknown: Exemplary gene or splice site sequence"
ugggugggua

SEQ ID NO: 2884 - RNA, 10 nt, Unknown
  source: /note="Description of Unknown: Exemplary gene or splice site sequence"
uggguggguc

SEQ ID NO: 2885 - RNA, 10 nt, Unknown
  source: /note="Description of Unknown: Exemplary gene or splice site sequence"
ugggugggug

SEQ ID NO: 2886 - RNA, 10 nt, Unknown
  source: /note="Description of Unknown: Exemplary gene or splice site sequence"
uggguggguu

SEQ ID NO: 2887 - RNA, 10 nt, Unknown
  source: /note="Description of Unknown: Exemplary gene or splice site sequence"
ugggugugga

SEQ ID NO: 2888 - RNA, 10 nt, Unknown
  source: /note="Description of Unknown: Exemplary gene or splice site sequence"
uggguguguc

SEQ ID NO: 2889 - RNA, 10 nt, Unknown
  source: /note="Description of Unknown: Exemplary gene or splice site sequence"
ugggugugug

SEQ ID NO: 2890 - RNA, 10 nt, Unknown
  source: /note="Description of Unknown: Exemplary gene or splice site sequence"
uggguguguu

SEQ ID NO: 2891 - RNA, 10 nt, Unknown
  source: /note="Description of Unknown: Exemplary gene or splice site sequence"
uggguguuua

SEQ ID NO: 2892 - RNA, 10 nt, Unknown
  source: /note="Description of Unknown: Exemplary gene or splice site sequence"
uggguuaaug

SEQ ID NO: 2893 - RNA, 10 nt, Unknown
  source: /note="Description of Unknown: Exemplary gene or splice site sequence"
uggguuaguc

SEQ ID NO: 2894 - RNA, 10 nt, Unknown
  source: /note="Description of Unknown: Exemplary gene or splice site sequence"
uggguuagug

SEQ ID NO: 2895 - RNA, 10 nt, Unknown
  source: /note="Description of Unknown: Exemplary gene or splice site sequence"
uggguuaguu

SEQ ID NO: 2896 - RNA, 10 nt, Unknown
  source: /note="Description of Unknown: Exemplary gene or splice site sequence"
uggguucaag

SEQ ID NO: 2897 - RNA, 10 nt, Unknown
  source: /note="Description of Unknown: Exemplary gene or splice site sequence"
uggguucgua

SEQ ID NO: 2898 - RNA, 10 nt, Unknown
  source: /note="Description of Unknown: Exemplary gene or splice site sequence"
uggguuggug

SEQ ID NO: 2899 - RNA, 10 nt, Unknown
  source: /note="Description of Unknown: Exemplary gene or splice site sequence"
uggguuuaag

SEQ ID NO: 2900 - RNA, 10 nt, Unknown
  source: /note="Description of Unknown: Exemplary gene or splice site sequence"
uggguuugua

SEQ ID NO: 2901 - RNA, 10 nt, Unknown
  source: /note="Description of Unknown: Exemplary gene or splice site sequence"
ugugcaagua

SEQ ID NO: 2902 - RNA, 10 nt, Unknown
  source: /note="Description of Unknown: Exemplary gene or splice site sequence"
uguguaaaua

SEQ ID NO: 2903 - RNA, 10 nt, Unknown
  source: /note="Description of Unknown: Exemplary gene or splice site sequence"
uguguaagaa

SEQ ID NO: 2904 - RNA, 10 nt, Unknown
  source: /note="Description of Unknown: Exemplary gene or splice site sequence"
uguguaagac

SEQ ID NO: 2905 - RNA, 10 nt, Unknown
  source: /note="Description of Unknown: Exemplary gene or splice site sequence"
uguguaagag

SEQ ID NO: 2906 - RNA, 10 nt, Unknown
  source: /note="Description of Unknown: Exemplary gene or splice site sequence"
uguguaaggu

SEQ ID NO: 2907 - RNA, 10 nt, Unknown
  source: /note="Description of Unknown: Exemplary gene or splice site sequence"
uguguaagua

SEQ ID NO: 2908 - RNA, 10 nt, Unknown
  source: /note="Description of Unknown: Exemplary gene or splice site sequence"
uguguaaguc

SEQ ID NO: 2909 - RNA, 10 nt, Unknown
  source: /note="Description of Unknown: Exemplary gene or splice site sequence"
uguguaaguu

SEQ ID NO: 2910 - RNA, 10 nt, Unknown
  source: /note="Description of Unknown: Exemplary gene or splice site sequence"
uguguacuuc

SEQ ID NO: 2911 - RNA, 10 nt, Unknown
  source: /note="Description of Unknown: Exemplary gene or splice site sequence"
uguguaggcg

SEQ ID NO: 2912 - RNA, 10 nt, Unknown
  source: /note="Description of Unknown: Exemplary gene or splice site sequence"
uguguaggua

SEQ ID NO: 2913 - RNA, 10 nt, Unknown
  source: /note="Description of Unknown: Exemplary gene or splice site sequence"
uguguaguua

SEQ ID NO: 2914 - RNA, 10 nt, Unknown
  source: /note="Description of Unknown: Exemplary gene or splice site sequence"
uguguaugug

SEQ ID NO: 2915 - RNA, 10 nt, Unknown
  source: /note="Description of Unknown: Exemplary gene or splice site sequence"
ugugucagua

SEQ ID NO: 2916 - RNA, 10 nt, Unknown
  source: /note="Description of Unknown: Exemplary gene or splice site sequence"
ugugucugua

SEQ ID NO: 2917 - RNA, 10 nt, Unknown
  source: /note="Description of Unknown: Exemplary gene or splice site sequence"
ugugucuguc

SEQ ID NO: 2918 - RNA, 10 nt, Unknown
  source: /note="Description of Unknown: Exemplary gene or splice site sequence"
ugugugaccc

SEQ ID NO: 2919 - RNA, 10 nt, Unknown
  source: /note="Description of Unknown: Exemplary gene or splice site sequence"
ugugugagau

SEQ ID NO: 2920 - RNA, 10 nt, Unknown
  source: /note="Description of Unknown: Exemplary gene or splice site sequence"
ugugugagca

SEQ ID NO: 2921 - RNA, 10 nt, Unknown
  source: /note="Description of Unknown: Exemplary gene or splice site sequence"
ugugugagcc

SEQ ID NO: 2922 - RNA, 10 nt, Unknown
  source: /note="Description of Unknown: Exemplary gene or splice site sequence"
ugugugagua

SEQ ID NO: 2923 - RNA, 10 nt, Unknown
  source: /note="Description of Unknown: Exemplary gene or splice site sequence"
ugugugaguc

SEQ ID NO: 2924 - RNA, 10 nt, Unknown
  source: /note="Description of Unknown: Exemplary gene or splice site sequence"
ugugugagug

SEQ ID NO: 2925 - RNA, 10 nt, Unknown
  source: /note="Description of Unknown: Exemplary gene or splice site sequence"
ugugugcgug

SEQ ID NO: 2926 - RNA, 10 nt, Unknown
  source: /note="Description of Unknown: Exemplary gene or splice site sequence"
ugugugggug

SEQ ID NO: 2927 - RNA, 10 nt, Unknown
  source: /note="Description of Unknown: Exemplary gene or splice site sequence"
uguguggguu

SEQ ID NO: 2928 - RNA, 10 nt, Unknown
  source: /note="Description of Unknown: Exemplary gene or splice site sequence"
ugugugugag

SEQ ID NO: 2929 - RNA, 10 nt, Unknown
  source: /note="Description of Unknown: Exemplary gene or splice site sequence"
uguguguucu

SEQ ID NO: 2930 - RNA, 10 nt, Unknown
  source: /note="Description of Unknown: Exemplary gene or splice site sequence"
uguguuuaga

SEQ ID NO: 2931 - RNA, 10 nt, Unknown
  source: /note="Description of Unknown: Exemplary gene or splice site sequence"
uuaguaaaua

SEQ ID NO: 2932 - RNA, 10 nt, Unknown
  source: /note="Description of Unknown: Exemplary gene or splice site sequence"
uuaguaagaa

SEQ ID NO: 2933 - RNA, 10 nt, Unknown
  source: /note="Description of Unknown: Exemplary gene or splice site sequence"
uuaguaagua

SEQ ID NO: 2934 - RNA, 10 nt, Unknown
  source: /note="Description of Unknown: Exemplary gene or splice site sequence"
uuaguaagug

SEQ ID NO: 2935 - RNA, 10 nt, Unknown
  source: /note="Description of Unknown: Exemplary gene or splice site sequence"
uuaguaaguu

SEQ ID NO: 2936 - RNA, 10 nt, Unknown
  source: /note="Description of Unknown: Exemplary gene or splice site sequence"
uuaguaggug

SEQ ID NO: 2937 - RNA, 10 nt, Unknown
  source: /note="Description of Unknown: Exemplary gene or splice site sequence"
uuagugagca

SEQ ID NO: 2938 - RNA, 10 nt, Unknown
  source: /note="Description of Unknown: Exemplary gene or splice site sequence"
uuagugaguu

SEQ ID NO: 2939 - RNA, 10 nt, Unknown
  source: /note="Description of Unknown: Exemplary gene or splice site sequence"
uuaguuaagu

SEQ ID NO: 2940 - RNA, 10 nt, Unknown
  source: /note="Description of Unknown: Exemplary gene or splice site sequence"
uucguaaguc

SEQ ID NO: 2941 - RNA, 10 nt, Unknown
  source: /note="Description of Unknown: Exemplary gene or splice site sequence"
uucguaaguu

SEQ ID NO: 2942 - RNA, 10 nt, Unknown
  source: /note="Description of Unknown: Exemplary gene or splice site sequence"
uucguaauua

SEQ ID NO: 2943 - RNA, 10 nt, Unknown
  source: /note="Description of Unknown: Exemplary gene or splice site sequence"
uucgugagua

SEQ ID NO: 2944 - RNA, 10 nt, Unknown
  source: /note="Description of Unknown: Exemplary gene or splice site sequence"
uucgugaguu

SEQ ID NO: 2945 - RNA, 10 nt, Unknown
  source: /note="Description of Unknown: Exemplary gene or splice site sequence"
uuggcaagug

SEQ ID NO: 2946 - RNA, 10 nt, Unknown
  source: /note="Description of Unknown: Exemplary gene or splice site sequence"
uuggccgagu

SEQ ID NO: 2947 - RNA, 10 nt, Unknown
  source: /note="Description of Unknown: Exemplary gene or splice site sequence"
uugguaaaaa

SEQ ID NO: 2948 - RNA, 10 nt, Unknown
  source: /note="Description of Unknown: Exemplary gene or splice site sequence"
uugguaaaau

SEQ ID NO: 2949 - RNA, 10 nt, Unknown
  source: /note="Description of Unknown: Exemplary gene or splice site sequence"
uugguaaaga

SEQ ID NO: 2950 - RNA, 10 nt, Unknown
  source: /note="Description of Unknown: Exemplary gene or splice site sequence"
uugguaaagg

SEQ ID NO: 2951 - RNA, 10 nt, Unknown
  source: /note="Description of Unknown: Exemplary gene or splice site sequence"
uugguaaagu

SEQ ID NO: 2952 - RNA, 10 nt, Unknown
  source: /note="Description of Unknown: Exemplary gene or splice site sequence"
uugguaaauc

SEQ ID NO: 2953 - RNA, 10 nt, Unknown
  source: /note="Description of Unknown: Exemplary gene or splice site sequence"
uugguaaaug

SEQ ID NO: 2954 - RNA, 10 nt, Unknown
  source: /note="Description of Unknown: Exemplary gene or splice site sequence"
uugguaaauu

SEQ ID NO: 2955 - RNA, 10 nt, Unknown
  source: /note="Description of Unknown: Exemplary gene or splice site sequence"
uugguaacug

SEQ ID NO: 2956 - RNA, 10 nt, Unknown
  source: /note="Description of Unknown: Exemplary gene or splice site sequence"
uugguaacuu

SEQ ID NO: 2957 - RNA, 10 nt, Unknown
  source: /note="Description of Unknown: Exemplary gene or splice site sequence"
uugguaagaa

SEQ ID NO: 2958 - RNA, 10 nt, Unknown
  source: /note="Description of Unknown: Exemplary gene or splice site sequence"
uugguaagag

SEQ ID NO: 2959 - RNA, 10 nt, Unknown
  source: /note="Description of Unknown: Exemplary gene or splice site sequence"
uugguaagcu

SEQ ID NO: 2960 - RNA, 10 nt, Unknown
  source: /note="Description of Unknown: Exemplary gene or splice site sequence"
uugguaagga

SEQ ID NO: 2961 - RNA, 10 nt, Unknown
  source: /note="Description of Unknown: Exemplary gene or splice site sequence"
uugguaaggg

SEQ ID NO: 2962 - RNA, 10 nt, Unknown
  source: /note="Description of Unknown: Exemplary gene or splice site sequence"
uugguaagua

SEQ ID NO: 2963 - RNA, 10 nt, Unknown
  source: /note="Description of Unknown: Exemplary gene or splice site sequence"
uugguaagug

SEQ ID NO: 2964 - RNA, 10 nt, Unknown
  source: /note="Description of Unknown: Exemplary gene or splice site sequence"
uugguaaguu

SEQ ID NO: 2965 - RNA, 10 nt, Unknown
  source: /note="Description of Unknown: Exemplary gene or splice site sequence"
uugguaauac

SEQ ID NO: 2966 - RNA, 10 nt, Unknown
  source: /note="Description of Unknown: Exemplary gene or splice site sequence"
uugguaauca

SEQ ID NO: 2967 - RNA, 10 nt, Unknown
  source: /note="Description of Unknown: Exemplary gene or splice site sequence"
uugguaaugc

SEQ ID NO: 2968 - RNA, 10 nt, Unknown
  source: /note="Description of Unknown: Exemplary gene or splice site sequence"
uugguaaugu

SEQ ID NO: 2969 - RNA, 10 nt, Unknown
  source: /note="Description of Unknown: Exemplary gene or splice site sequence"
uugguaauug

SEQ ID NO: 2970 - RNA, 10 nt, Unknown
  source: /note="Description of Unknown: Exemplary gene or splice site sequence"
uugguaauuu

SEQ ID NO: 2971 - RNA, 10 nt, Unknown
  source: /note="Description of Unknown: Exemplary gene or splice site sequence"
uugguacaua

SEQ ID NO: 2972 - RNA, 10 nt, Unknown
  source: /note="Description of Unknown: Exemplary gene or splice site sequence"
uugguacgug

SEQ ID NO: 2973 - RNA, 10 nt, Unknown
  source: /note="Description of Unknown: Exemplary gene or splice site sequence"
uugguagagg

SEQ ID NO: 2974 - RNA, 10 nt, Unknown
  source: /note="Description of Unknown: Exemplary gene or splice site sequence"
uugguaggac

SEQ ID NO: 2975 - RNA, 10 nt, Unknown
  source: /note="Description of Unknown: Exemplary gene or splice site sequence"
uugguaggcg

SEQ ID NO: 2976 - RNA, 10 nt, Unknown
  source: /note="Description of Unknown: Exemplary gene or splice site sequence"
uugguaggcu

SEQ ID NO: 2977 - RNA, 10 nt, Unknown
  source: /note="Description of Unknown: Exemplary gene or splice site sequence"
uugguaggga

SEQ ID NO: 2978 - RNA, 10 nt, Unknown
  source: /note="Description of Unknown: Exemplary gene or splice site sequence"
uugguaggua

SEQ ID NO: 2979 - RNA, 10 nt, Unknown
  source: /note="Description of Unknown: Exemplary gene or splice site sequence"
uugguagguc

SEQ ID NO: 2980 - RNA, 10 nt, Unknown
  source: /note="Description of Unknown: Exemplary gene or splice site sequence"
uugguaggug

SEQ ID NO: 2981 - RNA, 10 nt, Unknown
  source: /note="Description of Unknown: Exemplary gene or splice site sequence"
uugguauaaa

SEQ ID NO: 2982 - RNA, 10 nt, Unknown
  source: /note="Description of Unknown: Exemplary gene or splice site sequence"
uugguauaca

SEQ ID NO: 2983 - RNA, 10 nt, Unknown
  source: /note="Description of Unknown: Exemplary gene or splice site sequence"
uugguauauu

SEQ ID NO: 2984 - RNA, 10 nt, Unknown
  source: /note="Description of Unknown: Exemplary gene or splice site sequence"
uugguaucua

SEQ ID NO: 2985 - RNA, 10 nt, Unknown
  source: /note="Description of Unknown: Exemplary gene or splice site sequence"
uugguaucuc

SEQ ID NO: 2986 - RNA, 10 nt, Unknown
  source: /note="Description of Unknown: Exemplary gene or splice site sequence"
uugguaugca

SEQ ID NO: 2987 - RNA, 10 nt, Unknown
  source: /note="Description of Unknown: Exemplary gene or splice site sequence"
uugguaugua

SEQ ID NO: 2988 - RNA, 10 nt, Unknown
  source: /note="Description of Unknown: Exemplary gene or splice site sequence"
uugguaugug

SEQ ID NO: 2989 - RNA, 10 nt, Unknown
  source: /note="Description of Unknown: Exemplary gene or splice site sequence"
uugguauguu

SEQ ID NO: 2990 - RNA, 10 nt, Unknown
  source: /note="Description of Unknown: Exemplary gene or splice site sequence"
uugguauugu

SEQ ID NO: 2991 - RNA, 10 nt, Unknown
  source: /note="Description of Unknown: Exemplary gene or splice site sequence"
uugguauuua

SEQ ID NO: 2992 - RNA, 10 nt, Unknown
  source: /note="Description of Unknown: Exemplary gene or splice site sequence"
uugguauuuu

SEQ ID NO: 2993 - RNA, 10 nt, Unknown
  source: /note="Description of Unknown: Exemplary gene or splice site sequence"
uuggucagaa

SEQ ID NO: 2994 - RNA, 10 nt, Unknown
  source: /note="Description of Unknown: Exemplary gene or splice site sequence"
uuggucagua

SEQ ID NO: 2995 - RNA, 10 nt, Unknown
  source: /note="Description of Unknown: Exemplary gene or splice site sequence"
uuggucucug

SEQ ID NO: 2996 - RNA, 10 nt, Unknown
  source: /note="Description of Unknown: Exemplary gene or splice site sequence"
uuggucugca

SEQ ID NO: 2997 - RNA, 10 nt, Unknown
  source: /note="Description of Unknown: Exemplary gene or splice site sequence"
uuggugaaaa

SEQ ID NO: 2998 - RNA, 10 nt, Unknown
  source: /note="Description of Unknown: Exemplary gene or splice site sequence"
uuggugacug

SEQ ID NO: 2999 - RNA, 10 nt, Unknown
  source: /note="Description of Unknown: Exemplary gene or splice site sequence"
uuggugagac

SEQ ID NO: 3000 - RNA, 10 nt, Unknown
  source: /note="Description of Unknown: Exemplary gene or splice site sequence"
uuggugagau

SEQ ID NO: 3001 - RNA, 10 nt, Unknown
  source: /note="Description of Unknown: Exemplary gene or splice site sequence"
uuggugagca

SEQ ID NO: 3002 - RNA, 10 nt, Unknown
  source: /note="Description of Unknown: Exemplary gene or splice site sequence"
uuggugagga

SEQ ID NO: 3003 - RNA, 10 nt, Unknown
  source: /note="Description of Unknown: Exemplary gene or splice site sequence"
uuggugaggg

SEQ ID NO: 3004 - RNA, 10 nt, Unknown
  source: /note="Description of Unknown: Exemplary gene or splice site sequence"
uuggugagua

SEQ ID NO: 3005 - RNA, 10 nt, Unknown
  source: /note="Description of Unknown: Exemplary gene or splice site sequence"
uuggugaguc

SEQ ID NO: 3006 - RNA, 10 nt, Unknown
  source: /note="Description of Unknown: Exemplary gene or splice site sequence"
uuggugagug

SEQ ID NO: 3007 - RNA, 10 nt, Unknown
  source: /note="Description of Unknown: Exemplary gene or splice site sequence"
uuggugaguu

SEQ ID NO: 3008 - RNA, 10 nt, Unknown
  source: /note="Description of Unknown: Exemplary gene or splice site sequence"
uuggugaugg

SEQ ID NO: 3009 - RNA, 10 nt, Unknown
  source: /note="Description of Unknown: Exemplary gene or splice site sequence"
uuggugauua

SEQ ID NO: 3010 - RNA, 10 nt, Unknown
  source: /note="Description of Unknown: Exemplary gene or splice site sequence"
uuggugauug

SEQ ID NO: 3011 - RNA, 10 nt, Unknown
  source: /note="Description of Unknown: Exemplary gene or splice site sequence"
uuggugcaca

SEQ ID NO: 3012 - RNA, 10 nt, Unknown
  source: /note="Description of Unknown: Exemplary gene or splice site sequence"
uuggugggaa

SEQ ID NO: 3013 - RNA, 10 nt, Unknown
  source: /note="Description of Unknown: Exemplary gene or splice site sequence"
uugguggggc

SEQ ID NO: 3014 - RNA, 10 nt, Unknown
  source: /note="Description of Unknown: Exemplary gene or splice site sequence"
uuggugggua

SEQ ID NO: 3015 - RNA, 10 nt, Unknown
  source: /note="Description of Unknown: Exemplary gene or splice site sequence"
uugguggguc

SEQ ID NO: 3016 - RNA, 10 nt, Unknown
  source: /note="Description of Unknown: Exemplary gene or splice site sequence"
uuggugggug

SEQ ID NO: 3017 - RNA, 10 nt, Unknown
  source: /note="Description of Unknown: Exemplary gene or splice site sequence"
uugguggguu

SEQ ID NO: 3018 - RNA, 10 nt, Unknown
  source: /note="Description of Unknown: Exemplary gene or splice site sequence"
uugguguggu

SEQ ID NO: 3019 - RNA, 10 nt, Unknown
  source: /note="Description of Unknown: Exemplary gene or splice site sequence"
uugguguguc

SEQ ID NO: 3020 - RNA, 10 nt, Unknown
  source: /note="Description of Unknown: Exemplary gene or splice site sequence"
uuggugugug

SEQ ID NO: 3021 - RNA, 10 nt, Unknown
  source: /note="Description of Unknown: Exemplary gene or splice site sequence"
uugguguguu

SEQ ID NO: 3022 - RNA, 10 nt, Unknown
  source: /note="Description of Unknown: Exemplary gene or splice site sequence"
uugguuaagu

SEQ ID NO: 3023 - RNA, 10 nt, Unknown
  source: /note="Description of Unknown: Exemplary gene or splice site sequence"
uugguuagca

SEQ ID NO: 3024 - RNA, 10 nt, Unknown
  source: /note="Description of Unknown: Exemplary gene or splice site sequence"
uugguuagug

SEQ ID NO: 3025 - RNA, 10 nt, Unknown
  source: /note="Description of Unknown: Exemplary gene or splice site sequence"
uugguuaguu

SEQ ID NO: 3026 - RNA, 10 nt, Unknown
  source: /note="Description of Unknown: Exemplary gene or splice site sequence"
uugguuggga

SEQ ID NO: 3027 - RNA, 10 nt, Unknown
  source: /note="Description of Unknown: Exemplary gene or splice site sequence"
uugguugguu

SEQ ID NO: 3028 - RNA, 10 nt, Unknown
  source: /note="Description of Unknown: Exemplary gene or splice site sequence"
uugguuugua

SEQ ID NO: 3029 - RNA, 10 nt, Unknown
  source: /note="Description of Unknown: Exemplary gene or splice site sequence"
uugguuuguc

SEQ ID NO: 3030 - RNA, 10 nt, Unknown
  source: /note="Description of Unknown: Exemplary gene or splice site sequence"
uuugcaagug

SEQ ID NO: 3031 - RNA, 10 nt, Unknown
  source: /note="Description of Unknown: Exemplary gene or splice site sequence"
uuuguaaaua

SEQ ID NO: 3032 - RNA, 10 nt, Unknown
  source: /note="Description of Unknown: Exemplary gene or splice site sequence"
uuuguaaaug

SEQ ID NO: 3033 - RNA, 10 nt, Unknown
  source: /note="Description of Unknown: Exemplary gene or splice site sequence"
uuuguaagaa

SEQ ID NO: 3034 - RNA, 10 nt, Unknown
  source: /note="Description of Unknown: Exemplary gene or splice site sequence"
uuuguaagac

SEQ ID NO: 3035 - RNA, 10 nt, Unknown
  source: /note="Description of Unknown: Exemplary gene or splice site sequence"
uuuguaagag

SEQ ID NO: 3036 - RNA, 10 nt, Unknown
  source: /note="Description of Unknown: Exemplary gene or splice site sequence"
uuuguaagca

SEQ ID NO: 3037 - RNA, 10 nt, Unknown
  source: /note="Description of Unknown: Exemplary gene or splice site sequence"
uuuguaaggu

SEQ ID NO: 3038 - RNA, 10 nt, Unknown
  source: /note="Description of Unknown: Exemplary gene or splice site sequence"
uuuguaagua

SEQ ID NO: 3039 - RNA, 10 nt, Unknown
  source: /note="Description of Unknown: Exemplary gene or splice site sequence"
uuuguaaguc

SEQ ID NO: 3040 - RNA, 10 nt, Unknown
  source: /note="Description of Unknown: Exemplary gene or splice site sequence"
uuuguaagug

SEQ ID NO: 3041 - RNA, 10 nt, Unknown
  source: /note="Description of Unknown: Exemplary gene or splice site sequence"
uuuguaaguu

SEQ ID NO: 3042 - RNA, 10 nt, Unknown
  source: /note="Description of Unknown: Exemplary gene or splice site sequence"
uuuguaauuu

SEQ ID NO: 3043 - RNA, 10 nt, Unknown
  source: /note="Description of Unknown: Exemplary gene or splice site sequence"
uuuguacagg

SEQ ID NO: 3044 - RNA, 10 nt, Unknown
  source: /note="Description of Unknown: Exemplary gene or splice site sequence"
uuuguacgug

SEQ ID NO: 3045 - RNA, 10 nt, Unknown
  source: /note="Description of Unknown: Exemplary gene or splice site sequence"
uuuguacuag

SEQ ID NO: 3046 - RNA, 10 nt, Unknown
  source: /note="Description of Unknown: Exemplary gene or splice site sequence"
uuuguacugu

SEQ ID NO: 3047 - RNA, 10 nt, Unknown
  source: /note="Description of Unknown: Exemplary gene or splice site sequence"
uuuguagguu

SEQ ID NO: 3048 - RNA, 10 nt, Unknown
  source: /note="Description of Unknown: Exemplary gene or splice site sequence"
uuuguauccu

SEQ ID NO: 3049 - RNA, 10 nt, Unknown
  source: /note="Description of Unknown: Exemplary gene or splice site sequence"
uuuguauguu

SEQ ID NO: 3050 - RNA, 10 nt, Unknown
  source: /note="Description of Unknown: Exemplary gene or splice site sequence"
uuugugagca

SEQ ID NO: 3051 - RNA, 10 nt, Unknown
  source: /note="Description of Unknown: Exemplary gene or splice site sequence"
uuugugagug

SEQ ID NO: 3052 - RNA, 10 nt, Unknown
  source: /note="Description of Unknown: Exemplary gene or splice site sequence"
uuugugcguc

SEQ ID NO: 3053 - RNA, 10 nt, Unknown
  source: /note="Description of Unknown: Exemplary gene or splice site sequence"
uuuguguguc

SEQ ID NO: 3054 - RNA, 10 nt, Unknown
  source: /note="Description of Unknown: Exemplary gene or splice site sequence"
uggguaccug

SEQ ID NO: 3055 - RNA, 10 nt, Unknown
  source: /note="Description of Unknown: Exemplary gene or splice site sequence"
aagguuagag

SEQ ID NO: 3056 - RNA, 10 nt, Unknown
  source: /note="Description of Unknown: Exemplary gene or splice site sequence"
auggcacuua

SEQ ID NO: 3057 - RNA, 10 nt, Unknown
  source: /note="Description of Unknown: Exemplary gene or splice site sequence"
ugggugagcu

SEQ ID NO: 3058 - RNA, 10 nt, Unknown
  source: /note="Description of Unknown: Exemplary gene or splice site sequence"
cgagcugggc

SEQ ID NO: 3059 - RNA, 10 nt, Unknown
  source: /note="Description of Unknown: Exemplary gene or splice site sequence"
aaagcacccc

SEQ ID NO: 3060 - RNA, 10 nt, Unknown
  source: /note="Description of Unknown: Exemplary gene or splice site sequence"
uagguggggg

SEQ ID NO: 3061 - RNA, 10 nt, Unknown
  source: /note="Description of Unknown: Exemplary gene or splice site sequence"
agaguaacgu

SEQ ID NO: 3062 - RNA, 10 nt, Unknown
  source: /note="Description of Unknown: Exemplary gene or splice site sequence"
ucggugaugu

SEQ ID NO: 3063 - RNA, 10 nt, Unknown
  source: /note="Description of Unknown: Exemplary gene or splice site sequence"
agggucugag

SEQ ID NO: 3064 - RNA, 10 nt, Unknown
  source: /note="Description of Unknown: Exemplary gene or splice site sequence"
gaggugacug

SEQ ID NO: 3065 - RNA, 10 nt, Unknown
  source: /note="Description of Unknown: Exemplary gene or splice site sequence"
augguagguu

SEQ ID NO: 3066 - RNA, 10 nt, Unknown
  source: /note="Description of Unknown: Exemplary gene or splice site sequence"
caaguacugc

SEQ ID NO: 3067 - RNA, 10 nt, Unknown
  source: /note="Description of Unknown: Exemplary gene or splice site sequence"
cacgugcgua

SEQ ID NO: 3068 - RNA, 10 nt, Unknown
  source: /note="Description of Unknown: Exemplary gene or splice site sequence"
ccggugagcu

SEQ ID NO: 3069 - RNA, 10 nt, Unknown
  source: /note="Description of Unknown: Exemplary gene or splice site sequence"
cagguacuuc

SEQ ID NO: 3070 - RNA, 10 nt, Unknown
  source: /note="Description of Unknown: Exemplary gene or splice site sequence"
gaagcaagua

SEQ ID NO: 3071 - RNA, 10 nt, Unknown
  source: /note="Description of Unknown: Exemplary gene or splice site sequence"
caggcaaguc

SEQ ID NO: 3072 - RNA, 10 nt, Unknown
  source: /note="Description of Unknown: Exemplary gene or splice site sequence"
ccaguugggu

SEQ ID NO: 3073 - RNA, 10 nt, Unknown
  source: /note="Description of Unknown: Exemplary gene or splice site sequence"
aagguguggg

SEQ ID NO: 3074 - RNA, 10 nt, Unknown
  source: /note="Description of Unknown: Exemplary gene or splice site sequence"
ccgguaugaa

SEQ ID NO: 3075 - RNA, 10 nt, Unknown
  source: /note="Description of Unknown: Exemplary gene or splice site sequence"
agaguaauag

SEQ ID NO: 3076 - RNA, 10 nt, Unknown
  source: /note="Description of Unknown: Exemplary gene or splice site sequence"
cucguaugcc

SEQ ID NO: 3077 - RNA, 10 nt, Unknown
  source: /note="Description of Unknown: Exemplary gene or splice site sequence"
uaggcaaguu

SEQ ID NO: 3078 - RNA, 10 nt, Unknown
  source: /note="Description of Unknown: Exemplary gene or splice site sequence"
ggaguuaagu

SEQ ID NO: 3079 - RNA, 10 nt, Unknown
  source: /note="Description of Unknown: Exemplary gene or splice site sequence"
aagguuggcu

SEQ ID NO: 3080 - RNA, 10 nt, Unknown
  source: /note="Description of Unknown: Exemplary gene or splice site sequence"
ugaguaugug

SEQ ID NO: 3081 - RNA, 10 nt, Unknown
  source: /note="Description of Unknown: Exemplary gene or splice site sequence"
ccagccuucc

SEQ ID NO: 3082 - RNA, 10 nt, Unknown
  source: /note="Description of Unknown: Exemplary gene or splice site sequence"
ccuguacgug

SEQ ID NO: 3083 - RNA, 10 nt, Unknown
  source: /note="Description of Unknown: Exemplary gene or splice site sequence"
cagguacgcu

SEQ ID NO: 3084 - RNA, 10 nt, Unknown
  source: /note="Description of Unknown: Exemplary gene or splice site sequence"
gagguucuuc

SEQ ID NO: 3085 - RNA, 10 nt, Unknown
  source: /note="Description of Unknown: Exemplary gene or splice site sequence"
aagguugccu

SEQ ID NO: 3086 - RNA, 10 nt, Unknown
  source: /note="Description of Unknown: Exemplary gene or splice site sequence"
cguguucacu

SEQ ID NO: 3087 - RNA, 10 nt, Unknown
  source: /note="Description of Unknown: Exemplary gene or splice site sequence"
cgggugggga

SEQ ID NO: 3088 - RNA, 10 nt, Unknown
  source: /note="Description of Unknown: Exemplary gene or splice site sequence"
cggguaagga

SEQ ID NO: 3089 - RNA, 10 nt, Unknown
  source: /note="Description of Unknown: Exemplary gene or splice site sequence"
acgguagagc

SEQ ID NO: 3090 - RNA, 10 nt, Unknown
  source: /note="Description of Unknown: Exemplary gene or splice site sequence"
gcgguaagag

SEQ ID NO: 3091 - RNA, 10 nt, Unknown
  source: /note="Description of Unknown: Exemplary gene or splice site sequence"
cagguguugu

SEQ ID NO: 3092 - RNA, 10 nt, Unknown
  source: /note="Description of Unknown: Exemplary gene or splice site sequence"
gaaguuugug

SEQ ID NO: 3093 - RNA, 10 nt, Unknown
  source: /note="Description of Unknown: Exemplary gene or splice site sequence"
cggguucgug

SEQ ID NO: 3094 - RNA, 10 nt, Unknown
  source: /note="Description of Unknown: Exemplary gene or splice site sequence"
auuguccggc

SEQ ID NO: 3095 - RNA, 10 nt, Unknown
  source: /note="Description of Unknown: Exemplary gene or splice site sequence"
gaugugugug

SEQ ID NO: 3096 - RNA, 10 nt, Unknown
  source: /note="Description of Unknown: Exemplary gene or splice site sequence"
auggucuguu

SEQ ID NO: 3097 - RNA, 10 nt, Unknown
  source: /note="Description of Unknown: Exemplary gene or splice site sequence"
aguguaagga

SEQ ID NO: 3098 - RNA, 10 nt, Unknown
  source: /note="Description of Unknown: Exemplary gene or splice site sequence"
aaggugaaga

SEQ ID NO: 3099 - RNA, 10 nt, Unknown
  source: /note="Description of Unknown: Exemplary gene or splice site sequence"
uaggugagcg

SEQ ID NO: 3100 - RNA, 10 nt, Unknown
  source: /note="Description of Unknown: Exemplary gene or splice site sequence"
gccguaaguu

SEQ ID NO: 3101 - RNA, 10 nt, Unknown
  source: /note="Description of Unknown: Exemplary gene or splice site sequence"
acagcccaug

SEQ ID NO: 3102 - RNA, 10 nt, Unknown
  source: /note="Description of Unknown: Exemplary gene or splice site sequence"
gcggugagcc

SEQ ID NO: 3103 - RNA, 10 nt, Unknown
  source: /note="Description of Unknown: Exemplary gene or splice site sequence"
augguaccua

SEQ ID NO: 3104 - RNA, 10 nt, Unknown
  source: /note="Description of Unknown: Exemplary gene or splice site sequence"
augguggugc

SEQ ID NO: 3105 - RNA, 10 nt, Unknown
  source: /note="Description of Unknown: Exemplary gene or splice site sequence"
uaaguggcag

SEQ ID NO: 3106 - RNA, 10 nt, Unknown
  source: /note="Description of Unknown: Exemplary gene or splice site sequence"
uagguauagu

SEQ ID NO: 3107 - RNA, 10 nt, Unknown
  source: /note="Description of Unknown: Exemplary gene or splice site sequence"
cugguauuua

SEQ ID NO: 3108 - RNA, 10 nt, Unknown
  source: /note="Description of Unknown: Exemplary gene or splice site sequence"
aggguaaacg

SEQ ID NO: 3109 - RNA, 10 nt, Unknown
  source: /note="Description of Unknown: Exemplary gene or splice site sequence"
uugguacuga

SEQ ID NO: 3110 - RNA, 10 nt, Unknown
  source: /note="Description of Unknown: Exemplary gene or splice site sequence"
gagguggaua

SEQ ID NO: 3111 - RNA, 10 nt, Unknown
  source: /note="Description of Unknown: Exemplary gene or splice site sequence"
gauguaagaa

SEQ ID NO: 3112 - RNA, 10 nt, Unknown
  source: /note="Description of Unknown: Exemplary gene or splice site sequence"
acggucaguu

SEQ ID NO: 3113 - RNA, 10 nt, Unknown
  source: /note="Description of Unknown: Exemplary gene or splice site sequence"
uaaguaaaca

SEQ ID NO: 3114 - RNA, 10 nt, Unknown
  source: /note="Description of Unknown: Exemplary gene or splice site sequence"
aggguauuug

SEQ ID NO: 3115 - RNA, 10 nt, Unknown
  source: /note="Description of Unknown: Exemplary gene or splice site sequence"
caggugccac

SEQ ID NO: 3116 - RNA, 10 nt, Unknown
  source: /note="Description of Unknown: Exemplary gene or splice site sequence"
aauguacagg

SEQ ID NO: 3117 - RNA, 10 nt, Unknown
  source: /note="Description of Unknown: Exemplary gene or splice site sequence"
aguguaggug

SEQ ID NO: 3118 - RNA, 10 nt, Unknown
  source: /note="Description of Unknown: Exemplary gene or splice site sequence"
gagguaacuc

SEQ ID NO: 3119 - RNA, 10 nt, Unknown
  source: /note="Description of Unknown: Exemplary gene or splice site sequence"
gagguggcgc

SEQ ID NO: 3120 - RNA, 10 nt, Unknown
  source: /note="Description of Unknown: Exemplary gene or splice site sequence"
cugguaauug

SEQ ID NO: 3121 - RNA, 10 nt, Unknown
  source: /note="Description of Unknown: Exemplary gene or splice site sequence"
gagguuugcu

SEQ ID NO: 3122 - RNA, 10 nt, Unknown
  source: /note="Description of Unknown: Exemplary gene or splice site sequence"
uguguacgug

SEQ ID NO: 3123 - RNA, 10 nt, Unknown
  source: /note="Description of Unknown: Exemplary gene or splice site sequence"
cuaguaggca

SEQ ID NO: 3124 - RNA, 10 nt, Unknown
  source: /note="Description of Unknown: Exemplary gene or splice site sequence"
ucuguaaggc

SEQ ID NO: 3125 - RNA, 10 nt, Unknown
  source: /note="Description of Unknown: Exemplary gene or splice site sequence"
aagguaacca

SEQ ID NO: 3126 - RNA, 10 nt, Unknown
  source: /note="Description of Unknown: Exemplary gene or splice site sequence"
aacguaggac

SEQ ID NO: 3127 - RNA, 10 nt, Unknown
  source: /note="Description of Unknown: Exemplary gene or splice site sequence"
guagcaggua

SEQ ID NO: 3128 - RNA, 10 nt, Unknown
  source: /note="Description of Unknown: Exemplary gene or splice site sequence"
gaggucagac

SEQ ID NO: 3129 - RNA, 10 nt, Unknown
  source: /note="Description of Unknown: Exemplary gene or splice site sequence"
aggguaugaa

SEQ ID NO: 3130 - RNA, 10 nt, Unknown
  source: /note="Description of Unknown: Exemplary gene or splice site sequence"
caggcacgug

SEQ ID NO: 3131 - RNA, 10 nt, Unknown
  source: /note="Description of Unknown: Exemplary gene or splice site sequence"
ggggcaagac

SEQ ID NO: 3132 - RNA, 10 nt, Unknown
  source: /note="Description of Unknown: Exemplary gene or splice site sequence"
aaggcaaggu

SEQ ID NO: 3133 - RNA, 10 nt, Unknown
  source: /note="Description of Unknown: Exemplary gene or splice site sequence"
uuggugagaa

SEQ ID NO: 3134 - RNA, 10 nt, Unknown
  source: /note="Description of Unknown: Exemplary gene or splice site sequence"
gacgugaguc

SEQ ID NO: 3135 - RNA, 10 nt, Unknown
  source: /note="Description of Unknown: Exemplary gene or splice site sequence"
uauguaugcu

SEQ ID NO: 3136 - RNA, 10 nt, Unknown
  source: /note="Description of Unknown: Exemplary gene or splice site sequence"
caggugaacu

SEQ ID NO: 3137 - RNA, 10 nt, Unknown
  source: /note="Description of Unknown: Exemplary gene or splice site sequence"
cacguaaaug

SEQ ID NO: 3138 - RNA, 10 nt, Unknown
  source: /note="Description of Unknown: Exemplary gene or splice site sequence"
aaggugugau

SEQ ID NO: 3139 - RNA, 10 nt, Unknown
  source: /note="Description of Unknown: Exemplary gene or splice site sequence"
gaaguauuug

SEQ ID NO: 3140 - RNA, 10 nt, Unknown
  source: /note="Description of Unknown: Exemplary gene or splice site sequence"
aaggucugug

SEQ ID NO: 3141 - RNA, 10 nt, Unknown
  source: /note="Description of Unknown: Exemplary gene or splice site sequence"
aagguggagg

SEQ ID NO: 3142 - RNA, 10 nt, Unknown
  source: /note="Description of Unknown: Exemplary gene or splice site sequence"
aaaguucugu

SEQ ID NO: 3143 - RNA, 10 nt, Unknown
  source: /note="Description of Unknown: Exemplary gene or splice site sequence"
auugugagga

SEQ ID NO: 3144 - RNA, 10 nt, Unknown
  source: /note="Description of Unknown: Exemplary gene or splice site sequence"
cagguuggaa

SEQ ID NO: 3145 - RNA, 10 nt, Unknown
  source: /note="Description of Unknown: Exemplary gene or splice site sequence"
cuggucacuu

SEQ ID NO: 3146 - RNA, 10 nt, Unknown
  source: /note="Description of Unknown: Exemplary gene or splice site sequence"
aggguaggau

SEQ ID NO: 3147 - RNA, 10 nt, Unknown
  source: /note="Description of Unknown: Exemplary gene or splice site sequence"
aauguguguu

SEQ ID NO: 3148 - RNA, 10 nt, Unknown
  source: /note="Description of Unknown: Exemplary gene or splice site sequence"
aaggcgggcu

SEQ ID NO: 3149 - RNA, 10 nt, Unknown
  source: /note="Description of Unknown: Exemplary gene or splice site sequence"
auagcaagua

SEQ ID NO: 3150 - RNA, 10 nt, Unknown
  source: /note="Description of Unknown: Exemplary gene or splice site sequence"
caagcaaggc

SEQ ID NO: 3151 - RNA, 10 nt, Unknown
  source: /note="Description of Unknown: Exemplary gene or splice site sequence"
gugguaauua

SEQ ID NO: 3152 - RNA, 10 nt, Unknown
  source: /note="Description of Unknown: Exemplary gene or splice site sequence"
ucuguucagu

SEQ ID NO: 3153 - RNA, 10 nt, Unknown
  source: /note="Description of Unknown: Exemplary gene or splice site sequence"
aagguaucau

SEQ ID NO: 3154 - RNA, 10 nt, Unknown
  source: /note="Description of Unknown: Exemplary gene or splice site sequence"
uaaguuggca

SEQ ID NO: 3155 - RNA, 10 nt, Unknown
  source: /note="Description of Unknown: Exemplary gene or splice site sequence"
agugugaggc

SEQ ID NO: 3156 - RNA, 10 nt, Unknown
  source: /note="Description of Unknown: Exemplary gene or splice site sequence"
gagguuugug

SEQ ID NO: 3157 - RNA, 10 nt, Unknown
  source: /note="Description of Unknown: Exemplary gene or splice site sequence"
ugggucugcu

SEQ ID NO: 3158 - RNA, 10 nt, Unknown
  source: /note="Description of Unknown: Exemplary gene or splice site sequence"
caggugcagu

SEQ ID NO: 3159 - RNA, 10 nt, Unknown
  source: /note="Description of Unknown: Exemplary gene or splice site sequence"
aagguggagu

SEQ ID NO: 3160 - RNA, 10 nt, Unknown
  source: /note="Description of Unknown: Exemplary gene or splice site sequence"
ggggucaguu

SEQ ID NO: 3161 - RNA, 10 nt, Unknown
  source: /note="Description of Unknown: Exemplary gene or splice site sequence"
gggguagggu

SEQ ID NO: 3162 - RNA, 10 nt, Unknown
  source: /note="Description of Unknown: Exemplary gene or splice site sequence"
aaggccagca

SEQ ID NO: 3163 - RNA, 10 nt, Unknown
  source: /note="Description of Unknown: Exemplary gene or splice site sequence"
cgaguaugcc

SEQ ID NO: 3164 - RNA, 10 nt, Unknown
  source: /note="Description of Unknown: Exemplary gene or splice site sequence"
guggugagcg

SEQ ID NO: 3165 - RNA, 10 nt, Unknown
  source: /note="Description of Unknown: Exemplary gene or splice site sequence"
gguguaugaa

SEQ ID NO: 3166 - RNA, 10 nt, Unknown
  source: /note="Description of Unknown: Exemplary gene or splice site sequence"
agggcgaguu

SEQ ID NO: 3167 - RNA, 10 nt, Unknown
  source: /note="Description of Unknown: Exemplary gene or splice site sequence"
cagguuuugc

SEQ ID NO: 3168 - RNA, 10 nt, Unknown
  source: /note="Description of Unknown: Exemplary gene or splice site sequence"
uuugugaguu

SEQ ID NO: 3169 - RNA, 10 nt, Unknown
  source: /note="Description of Unknown: Exemplary gene or splice site sequence"
gagguccucu

SEQ ID NO: 3170 - RNA, 10 nt, Unknown
  source: /note="Description of Unknown: Exemplary gene or splice site sequence"
ccagcaggua

SEQ ID NO: 3171 - RNA, 10 nt, Unknown
  source: /note="Description of Unknown: Exemplary gene or splice site sequence"
gagguucgcg

SEQ ID NO: 3172 - RNA, 10 nt, Unknown
  source: /note="Description of Unknown: Exemplary gene or splice site sequence"
caggcaaaua

SEQ ID NO: 3173 - RNA, 10 nt, Unknown
  source: /note="Description of Unknown: Exemplary gene or splice site sequence"
cagguuaaau

SEQ ID NO: 3174 - RNA, 10 nt, Unknown
  source: /note="Description of Unknown: Exemplary gene or splice site sequence"
uugguaauaa

SEQ ID NO: 3175 - RNA, 10 nt, Unknown
  source: /note="Description of Unknown: Exemplary gene or splice site sequence"
uauguaggua

SEQ ID NO: 3176 - RNA, 10 nt, Unknown
  source: /note="Description of Unknown: Exemplary gene or splice site sequence"
aaggugugcc

SEQ ID NO: 3177 - RNA, 10 nt, Unknown
  source: /note="Description of Unknown: Exemplary gene or splice site sequence"
caggcaagca

SEQ ID NO: 3178 - RNA, 10 nt, Unknown
  source: /note="Description of Unknown: Exemplary gene or splice site sequence"
acgguaaaug

SEQ ID NO: 3179 - RNA, 10 nt, Unknown
  source: /note="Description of Unknown: Exemplary gene or splice site sequence"
gcugugagca

SEQ ID NO: 3180 - RNA, 10 nt, Unknown
  source: /note="Description of Unknown: Exemplary gene or splice site sequence"
augguacaca

SEQ ID NO: 3181 - RNA, 10 nt, Unknown
  source: /note="Description of Unknown: Exemplary gene or splice site sequence"
guaguguguu

SEQ ID NO: 3182 - RNA, 10 nt, Unknown
  source: /note="Description of Unknown: Exemplary gene or splice site sequence"
acuguaagag

SEQ ID NO: 3183 - RNA, 10 nt, Unknown
  source: /note="Description of Unknown: Exemplary gene or splice site sequence"
cccgcagguc

SEQ ID NO: 3184 - RNA, 10 nt, Unknown
  source: /note="Description of Unknown: Exemplary gene or splice site sequence"
gaggugcugu

SEQ ID NO: 3185 - RNA, 10 nt, Unknown
  source: /note="Description of Unknown: Exemplary gene or splice site sequence"
uaaguaugcu

SEQ ID NO: 3186 - RNA, 10 nt, Unknown
  source: /note="Description of Unknown: Exemplary gene or splice site sequence"
gaggccaucu

SEQ ID NO: 3187 - RNA, 10 nt, Unknown
  source: /note="Description of Unknown: Exemplary gene or splice site sequence"
caggugcuac

SEQ ID NO: 3188 - RNA, 10 nt, Unknown
  source: /note="Description of Unknown: Exemplary gene or splice site sequence"
gaggugugaa

SEQ ID NO: 3189 - RNA, 10 nt, Unknown
  source: /note="Description of Unknown: Exemplary gene or splice site sequence"
guggcgcgcg

SEQ ID NO: 3190 - RNA, 10 nt, Unknown
  source: /note="Description of Unknown: Exemplary gene or splice site sequence"
uaaguggagg

SEQ ID NO: 3191 - RNA, 10 nt, Unknown
  source: /note="Description of Unknown: Exemplary gene or splice site sequence"
caugugggua

SEQ ID NO: 3192 - RNA, 10 nt, Unknown
  source: /note="Description of Unknown: Exemplary gene or splice site sequence"
gagguagggu

SEQ ID NO: 3193 - RNA, 10 nt, Unknown
  source: /note="Description of Unknown: Exemplary gene or splice site sequence"
aggguucuag

SEQ ID NO: 3194 - RNA, 10 nt, Unknown
  source: /note="Description of Unknown: Exemplary gene or splice site sequence"
ugugugagcu

SEQ ID NO: 3195 - RNA, 10 nt, Unknown
  source: /note="Description of Unknown: Exemplary gene or splice site sequence"
agggugaauc

SEQ ID NO: 3196 - RNA, 10 nt, Unknown
  source: /note="Description of Unknown: Exemplary gene or splice site sequence"
caggucaggg

SEQ ID NO: 3197 - RNA, 10 nt, Unknown
  source: /note="Description of Unknown: Exemplary gene or splice site sequence"
aaggucccug

SEQ ID NO: 3198 - RNA, 10 nt, Unknown
  source: /note="Description of Unknown: Exemplary gene or splice site sequence"
cugguagagu

SEQ ID NO: 3199 - RNA, 10 nt, Unknown
  source: /note="Description of Unknown: Exemplary gene or splice site sequence"
caggugcuuu

SEQ ID NO: 3200 - RNA, 10 nt, Unknown
  source: /note="Description of Unknown: Exemplary gene or splice site sequence"
ggggugcacg

SEQ ID NO: 3201 - RNA, 10 nt, Unknown
  source: /note="Description of Unknown: Exemplary gene or splice site sequence"
acugugcuac

SEQ ID NO: 3202 - RNA, 10 nt, Unknown
  source: /note="Description of Unknown: Exemplary gene or splice site sequence"
cagguaccua

SEQ ID NO: 3203 - RNA, 10 nt, Unknown
  source: /note="Description of Unknown: Exemplary gene or splice site sequence"
aggguaaucu

SEQ ID NO: 3204 - RNA, 10 nt, Unknown
  source: /note="Description of Unknown: Exemplary gene or splice site sequence"
agggcacuug

SEQ ID NO: 3205 - RNA, 10 nt, Unknown
  source: /note="Description of Unknown: Exemplary gene or splice site sequence"
gagguaaugc

SEQ ID NO: 3206 - RNA, 10 nt, Unknown
  source: /note="Description of Unknown: Exemplary gene or splice site sequence"
ccagugaguu

SEQ ID NO: 3207 - RNA, 10 nt, Unknown
  source: /note="Description of Unknown: Exemplary gene or splice site sequence"
cuggugaauc

SEQ ID NO: 3208 - RNA, 10 nt, Unknown
  source: /note="Description of Unknown: Exemplary gene or splice site sequence"
ccugcaggug

SEQ ID NO: 3209 - RNA, 10 nt, Unknown
  source: /note="Description of Unknown: Exemplary gene or splice site sequence"
gaggugaggu

SEQ ID NO: 3210 - RNA, 10 nt, Unknown
  source: /note="Description of Unknown: Exemplary gene or splice site sequence"
cugguaaaac

SEQ ID NO: 3211 - RNA, 10 nt, Unknown
  source: /note="Description of Unknown: Exemplary gene or splice site sequence"
ugugugugcu

SEQ ID NO: 3212 - RNA, 10 nt, Unknown
  source: /note="Description of Unknown: Exemplary gene or splice site sequence"
cagguuaagu

SEQ ID NO: 3213 - RNA, 10 nt, Unknown
  source: /note="Description of Unknown: Exemplary gene or splice site sequence"
uagguauuug

SEQ ID NO: 3214 - RNA, 10 nt, Unknown
  source: /note="Description of Unknown: Exemplary gene or splice site sequence"
agcgugcgug

SEQ ID NO: 3215 - RNA, 10 nt, Unknown
  source: /note="Description of Unknown: Exemplary gene or splice site sequence"
ggggugggca

SEQ ID NO: 3216 - RNA, 10 nt, Unknown
  source: /note="Description of Unknown: Exemplary gene or splice site sequence"
cugguuguua

SEQ ID NO: 3217 - RNA, 10 nt, Unknown
  source: /note="Description of Unknown: Exemplary gene or splice site sequence"
cagguaauag

SEQ ID NO: 3218 - RNA, 10 nt, Unknown
  source: /note="Description of Unknown: Exemplary gene or splice site sequence"
uaggugaguu

SEQ ID NO: 3219 - RNA, 10 nt, Unknown
  source: /note="Description of Unknown: Exemplary gene or splice site sequence"
uagguaaucc

SEQ ID NO: 3220 - RNA, 10 nt, Unknown
  source: /note="Description of Unknown: Exemplary gene or splice site sequence"
ccggugacug

SEQ ID NO: 3221 - RNA, 10 nt, Unknown
  source: /note="Description of Unknown: Exemplary gene or splice site sequence"
gucgugauua

SEQ ID NO: 3222 - RNA, 10 nt, Unknown
  source: /note="Description of Unknown: Exemplary gene or splice site sequence"
uagguaguca

SEQ ID NO: 3223 - RNA, 10 nt, Unknown
  source: /note="Description of Unknown: Exemplary gene or splice site sequence"
cugguaaguc

SEQ ID NO: 3224 - RNA, 10 nt, Unknown
  source: /note="Description of Unknown: Exemplary gene or splice site sequence"
agggugagcg

SEQ ID NO: 3225 - RNA, 10 nt, Unknown
  source: /note="Description of Unknown: Exemplary gene or splice site sequence"
auugugacca

SEQ ID NO: 3226 - RNA, 10 nt, Unknown
  source: /note="Description of Unknown: Exemplary gene or splice site sequence"
cuagcaagug

SEQ ID NO: 3227 - RNA, 10 nt, Unknown
  source: /note="Description of Unknown: Exemplary gene or splice site sequence"
cuggugagau

SEQ ID NO: 3228 - RNA, 10 nt, Unknown
  source: /note="Description of Unknown: Exemplary gene or splice site sequence"
auggcucgag

SEQ ID NO: 3229 - RNA, 10 nt, Unknown
  source: /note="Description of Unknown: Exemplary gene or splice site sequence"
uuggugugua

SEQ ID NO: 3230 - RNA, 10 nt, Unknown
  source: /note="Description of Unknown: Exemplary gene or splice site sequence"
gaggugucug

SEQ ID NO: 3231 - RNA, 10 nt, Unknown
  source: /note="Description of Unknown: Exemplary gene or splice site sequence"
gaggugggac

SEQ ID NO: 3232 - RNA, 10 nt, Unknown
  source: /note="Description of Unknown: Exemplary gene or splice site sequence"
ggggugggag

SEQ ID NO: 3233 - RNA, 10 nt, Unknown
  source: /note="Description of Unknown: Exemplary gene or splice site sequence"
gcagcgugag

SEQ ID NO: 3234 - RNA, 10 nt, Unknown
  source: /note="Description of Unknown: Exemplary gene or splice site sequence"
cugguaugag

SEQ ID NO: 3235 - RNA, 10 nt, Unknown
  source: /note="Description of Unknown: Exemplary gene or splice site sequence"
aacguaaaau

SEQ ID NO: 3236 - RNA, 10 nt, Unknown
  source: /note="Description of Unknown: Exemplary gene or splice site sequence"
cuuguaagca

SEQ ID NO: 3237 - RNA, 10 nt, Unknown
  source: /note="Description of Unknown: Exemplary gene or splice site sequence"
auuguaagcc

SEQ ID NO: 3238 - RNA, 10 nt, Unknown
  source: /note="Description of Unknown: Exemplary gene or splice site sequence"
caaguaugga

SEQ ID NO: 3239 - RNA, 10 nt, Unknown
  source: /note="Description of Unknown: Exemplary gene or splice site sequence"
gaggucaugc

SEQ ID NO: 3240 - RNA, 10 nt, Unknown
  source: /note="Description of Unknown: Exemplary gene or splice site sequence"
acagugagac

SEQ ID NO: 3241 - RNA, 10 nt, Unknown
  source: /note="Description of Unknown: Exemplary gene or splice site sequence"
caggucugau

SEQ ID NO: 3242 - RNA, 10 nt, Unknown
  source: /note="Description of Unknown: Exemplary gene or splice site sequence"
gaaguugggu

SEQ ID NO: 3243 - RNA, 10 nt, Unknown
  source: /note="Description of Unknown: Exemplary gene or splice site sequence"
ggaguaaggc

SEQ ID NO: 3244 - RNA, 10 nt, Unknown
  source: /note="Description of Unknown: Exemplary gene or splice site sequence"
aaggucauuu

SEQ ID NO: 3245 - RNA, 10 nt, Unknown
  source: /note="Description of Unknown: Exemplary gene or splice site sequence"
cagguagucu

SEQ ID NO: 3246 - RNA, 10 nt, Unknown
  source: /note="Description of Unknown: Exemplary gene or splice site sequence"
augguaucug

SEQ ID NO: 3247 - RNA, 10 nt, Unknown
  source: /note="Description of Unknown: Exemplary gene or splice site sequence"
aaaguaaagc

SEQ ID NO: 3248 - RNA, 10 nt, Unknown
  source: /note="Description of Unknown: Exemplary gene or splice site sequence"
gaggcgggua

SEQ ID NO: 3249 - RNA, 10 nt, Unknown
  source: /note="Description of Unknown: Exemplary gene or splice site sequence"
cgaguacgau

SEQ ID NO: 3250 - RNA, 10 nt, Unknown
  source: /note="Description of Unknown: Exemplary gene or splice site sequence"
aaaguauggg

SEQ ID NO: 3251 - RNA, 10 nt, Unknown
  source: /note="Description of Unknown: Exemplary gene or splice site sequence"
uaggcugguc

SEQ ID NO: 3252 - RNA, 10 nt, Unknown
  source: /note="Description of Unknown: Exemplary gene or splice site sequence"
uugguaaaac

SEQ ID NO: 3253 - RNA, 10 nt, Unknown
  source: /note="Description of Unknown: Exemplary gene or splice site sequence"
uggguuaugu

SEQ ID NO: 3254 - RNA, 10 nt, Unknown
  source: /note="Description of Unknown: Exemplary gene or splice site sequence"
gauguaacca

SEQ ID NO: 3255 - RNA, 10 nt, Unknown
  source: /note="Description of Unknown: Exemplary gene or splice site sequence"
aaggugcggg

SEQ ID NO: 3256 - RNA, 10 nt, Unknown
  source: /note="Description of Unknown: Exemplary gene or splice site sequence"
ccgguacgug

SEQ ID NO: 3257 - RNA, 10 nt, Unknown
  source: /note="Description of Unknown: Exemplary gene or splice site sequence"
gaugugagaa

SEQ ID NO: 3258 - RNA, 10 nt, Unknown
  source: /note="Description of Unknown: Exemplary gene or splice site sequence"
guggcgguga

SEQ ID NO: 3259 - RNA, 10 nt, Unknown
  source: /note="Description of Unknown: Exemplary gene or splice site sequence"
cagguauuag

SEQ ID NO: 3260 - RNA, 10 nt, Unknown
  source: /note="Description of Unknown: Exemplary gene or splice site sequence"
gagguuggga

SEQ ID NO: 3261 - RNA, 10 nt, Unknown
  source: /note="Description of Unknown: Exemplary gene or splice site sequence"
aaggcuagua

SEQ ID NO: 3262 - RNA, 10 nt, Unknown
  source: /note="Description of Unknown: Exemplary gene or splice site sequence"
caggcaggga

SEQ ID NO: 3263 - RNA, 10 nt, Unknown
  source: /note="Description of Unknown: Exemplary gene or splice site sequence"
aauguuaguu

SEQ ID NO: 3264 - RNA, 10 nt, Unknown
  source: /note="Description of Unknown: Exemplary gene or splice site sequence"
gagguaaagg

SEQ ID NO: 3265 - RNA, 10 nt, Unknown
  source: /note="Description of Unknown: Exemplary gene or splice site sequence"
caggccggcg

SEQ ID NO: 3266 - RNA, 10 nt, Unknown
  source: /note="Description of Unknown: Exemplary gene or splice site sequence"
uaaguacuug

SEQ ID NO: 3267 - RNA, 10 nt, Unknown
  source: /note="Description of Unknown: Exemplary gene or splice site sequence"
ucgguagggg

SEQ ID NO: 3268 - RNA, 10 nt, Unknown
  source: /note="Description of Unknown: Exemplary gene or splice site sequence"
cccgugagau

SEQ ID NO: 3269 - RNA, 10 nt, Unknown
  source: /note="Description of Unknown: Exemplary gene or splice site sequence"
gugguuguuu

SEQ ID NO: 3270 - RNA, 10 nt, Unknown
  source: /note="Description of Unknown: Exemplary gene or splice site sequence"
gagguaagac

SEQ ID NO: 3271 - RNA, 10 nt, Unknown
  source: /note="Description of Unknown: Exemplary gene or splice site sequence"
gauguagguc

SEQ ID NO: 3272 - RNA, 10 nt, Unknown
  source: /note="Description of Unknown: Exemplary gene or splice site sequence"
gagguugggg

SEQ ID NO: 3273 - RNA, 10 nt, Unknown
  source: /note="Description of Unknown: Exemplary gene or splice site sequence"
gaggcgagua

SEQ ID NO: 3274 - RNA, 10 nt, Unknown
  source: /note="Description of Unknown: Exemplary gene or splice site sequence"
ccagcguaau

SEQ ID NO: 3275 - RNA, 10 nt, Unknown
  source: /note="Description of Unknown: Exemplary gene or splice site sequence"
acggugaggu

SEQ ID NO: 3276 - RNA, 10 nt, Unknown
  source: /note="Description of Unknown: Exemplary gene or splice site sequence"
gggguauauu

SEQ ID NO: 3277 - RNA, 10 nt, Unknown
  source: /note="Description of Unknown: Exemplary gene or splice site sequence"
uauguaaauu

SEQ ID NO: 3278 - RNA, 10 nt, Unknown
  source: /note="Description of Unknown: Exemplary gene or splice site sequence"
acgguacuua

SEQ ID NO: 3279 - RNA, 10 nt, Unknown
  source: /note="Description of Unknown: Exemplary gene or splice site sequence"
gaggucagca

SEQ ID NO: 3280 - RNA, 10 nt, Unknown
  source: /note="Description of Unknown: Exemplary gene or splice site sequence"
ggggucagac

SEQ ID NO: 3281 - RNA, 10 nt, Unknown
  source: /note="Description of Unknown: Exemplary gene or splice site sequence"
aaugugugag

SEQ ID NO: 3282 - RNA, 10 nt, Unknown
  source: /note="Description of Unknown: Exemplary gene or splice site sequence"
uccgucagua

SEQ ID NO: 3283 - RNA, 10 nt, Unknown
  source: /note="Description of Unknown: Exemplary gene or splice site sequence"
ccaguuagug

SEQ ID NO: 3284 - RNA, 10 nt, Unknown
  source: /note="Description of Unknown: Exemplary gene or splice site sequence"
agggugcaug

SEQ ID NO: 3285 - RNA, 10 nt, Unknown
  source: /note="Description of Unknown: Exemplary gene or splice site sequence"
gggguaggau

SEQ ID NO: 3286 - RNA, 10 nt, Unknown
  source: /note="Description of Unknown: Exemplary gene or splice site sequence"
gagguguucg

SEQ ID NO: 3287 - RNA, 10 nt, Unknown
  source: /note="Description of Unknown: Exemplary gene or splice site sequence"
uuggcaagaa

SEQ ID NO: 3288 - RNA, 10 nt, Unknown
  source: /note="Description of Unknown: Exemplary gene or splice site sequence"
uccguaagua

SEQ ID NO: 3289 - RNA, 10 nt, Unknown
  source: /note="Description of Unknown: Exemplary gene or splice site sequence"
cagguguaag

SEQ ID NO: 3290 - RNA, 10 nt, Unknown
  source: /note="Description of Unknown: Exemplary gene or splice site sequence"
gagguguuuu

SEQ ID NO: 3291 - RNA, 10 nt, Unknown
  source: /note="Description of Unknown: Exemplary gene or splice site sequence"
guagugagcu

SEQ ID NO: 3292 - RNA, 10 nt, Unknown
  source: /note="Description of Unknown: Exemplary gene or splice site sequence"
caggugaaaa

SEQ ID NO: 3293 - RNA, 10 nt, Unknown
  source: /note="Description of Unknown: Exemplary gene or splice site sequence"
aggguacagg

SEQ ID NO: 3294 - RNA, 10 nt, Unknown
  source: /note="Description of Unknown: Exemplary gene or splice site sequence"
aagguaacgc

SEQ ID NO: 3295 - RNA, 10 nt, Unknown
  source: /note="Description of Unknown: Exemplary gene or splice site sequence"
aagguauacc

SEQ ID NO: 3296 - RNA, 10 nt, Unknown
  source: /note="Description of Unknown: Exemplary gene or splice site sequence"
ccugugagau

SEQ ID NO: 3297 - RNA, 10 nt, Unknown
  source: /note="Description of Unknown: Exemplary gene or splice site sequence"
gggguacgug

SEQ ID NO: 3298 - RNA, 10 nt, Unknown
  source: /note="Description of Unknown: Exemplary gene or splice site sequence"
gaaguaggag

SEQ ID NO: 3299 - RNA, 10 nt, Unknown
  source: /note="Description of Unknown: Exemplary gene or splice site sequence"
ucgguaaggg

SEQ ID NO: 3300 - RNA, 10 nt, Unknown
  source: /note="Description of Unknown: Exemplary gene or splice site sequence"
ccgguaagcg

SEQ ID NO: 3301 - RNA, 10 nt, Unknown
  source: /note="Description of Unknown: Exemplary gene or splice site sequence"
ccaguuuuug

SEQ ID NO: 3302 - RNA, 10 nt, Unknown
  source: /note="Description of Unknown: Exemplary gene or splice site sequence"
aaggugcugu

SEQ ID NO: 3303 - RNA, 10 nt, Unknown
  source: /note="Description of Unknown: Exemplary gene or splice site sequence"
aaaguacacc

SEQ ID NO: 3304 - RNA, 10 nt, Unknown
  source: /note="Description of Unknown: Exemplary gene or splice site sequence"
gaaguacgug

SEQ ID NO: 3305 - RNA, 10 nt, Unknown
  source: /note="Description of Unknown: Exemplary gene or splice site sequence"
uguguagggg

SEQ ID NO: 3306 - RNA, 10 nt, Unknown
  source: /note="Description of Unknown: Exemplary gene or splice site sequence"
uuggugaggc

SEQ ID NO: 3307 - RNA, 10 nt, Unknown
  source: /note="Description of Unknown: Exemplary gene or splice site sequence"
cagguccucc

SEQ ID NO: 3308 - RNA, 10 nt, Unknown
  source: /note="Description of Unknown: Exemplary gene or splice site sequence"
auggucugua

SEQ ID NO: 3309 - RNA, 10 nt, Unknown
  source: /note="Description of Unknown: Exemplary gene or splice site sequence"
caugcaggug

SEQ ID NO: 3310 - RNA, 10 nt, Unknown
  source: /note="Description of Unknown: Exemplary gene or splice site sequence"
cugguacacc

SEQ ID NO: 3311 - RNA, 10 nt, Unknown
  source: /note="Description of Unknown: Exemplary gene or splice site sequence"
cagguccuua

SEQ ID NO: 3312 - RNA, 10 nt, Unknown
  source: /note="Description of Unknown: Exemplary gene or splice site sequence"
auggcagccu

SEQ ID NO: 3313 - RNA, 10 nt, Unknown
  source: /note="Description of Unknown: Exemplary gene or splice site sequence"
aacgugaggc

SEQ ID NO: 3314 - RNA, 10 nt, Unknown
  source: /note="Description of Unknown: Exemplary gene or splice site sequence"
acgguccagg

SEQ ID NO: 3315 - RNA, 10 nt, Unknown
  source: /note="Description of Unknown: Exemplary gene or splice site sequence"
ucuguacaua

SEQ ID NO: 3316 - RNA, 10 nt, Unknown
  source: /note="Description of Unknown: Exemplary gene or splice site sequence"
gaggugauua

SEQ ID NO: 3317 - RNA, 10 nt, Unknown
  source: /note="Description of Unknown: Exemplary gene or splice site sequence"
acgguaaaua

SEQ ID NO: 3318 - RNA, 10 nt, Unknown
  source: /note="Description of Unknown: Exemplary gene or splice site sequence"
augguaacug

SEQ ID NO: 3319 - RNA, 10 nt, Unknown
  source: /note="Description of Unknown: Exemplary gene or splice site sequence"
caggcgcguu

SEQ ID NO: 3320 - RNA, 10 nt, Unknown
  source: /note="Description of Unknown: Exemplary gene or splice site sequence"
aagguuuguu

SEQ ID NO: 3321 - RNA, 10 nt, Unknown
  source: /note="Description of Unknown: Exemplary gene or splice site sequence"
cagguuagga

SEQ ID NO: 3322 - RNA, 10 nt, Unknown
  source: /note="Description of Unknown: Exemplary gene or splice site sequence"
auggugacug

SEQ ID NO: 3323 - RNA, 10 nt, Unknown
  source: /note="Description of Unknown: Exemplary gene or splice site sequence"
uugguauccc

SEQ ID NO: 3324 - RNA, 10 nt, Unknown
  source: /note="Description of Unknown: Exemplary gene or splice site sequence"
cuuguaggac

SEQ ID NO: 3325 - RNA, 10 nt, Unknown
  source: /note="Description of Unknown: Exemplary gene or splice site sequence"
gggguauggc

SEQ ID NO: 3326 - RNA, 10 nt, Unknown
  source: /note="Description of Unknown: Exemplary gene or splice site sequence"
gggguaggac

SEQ ID NO: 3327 - RNA, 10 nt, Unknown
  source: /note="Description of Unknown: Exemplary gene or splice site sequence"
aucguaagcu

SEQ ID NO: 3328 - RNA, 10 nt, Unknown
  source: /note="Description of Unknown: Exemplary gene or splice site sequence"
ggugugagca

SEQ ID NO: 3329 - RNA, 10 nt, Unknown
  source: /note="Description of Unknown: Exemplary gene or splice site sequence"
cugguuggua

SEQ ID NO: 3330 - RNA, 10 nt, Unknown
  source: /note="Description of Unknown: Exemplary gene or splice site sequence"
gggguuaggg

SEQ ID NO: 3331 - RNA, 10 nt, Unknown
  source: /note="Description of Unknown: Exemplary gene or splice site sequence"
ugaguaagaa

SEQ ID NO: 3332 - RNA, 10 nt, Unknown
  source: /note="Description of Unknown: Exemplary gene or splice site sequence"
caggcucgug

SEQ ID NO: 3333 - RNA, 10 nt, Unknown
  source: /note="Description of Unknown: Exemplary gene or splice site sequence"
uagguagagu

SEQ ID NO: 3334 - RNA, 10 nt, Unknown
  source: /note="Description of Unknown: Exemplary gene or splice site sequence"
uaggugcccu

SEQ ID NO: 3335 - RNA, 10 nt, Unknown
  source: /note="Description of Unknown: Exemplary gene or splice site sequence"
accgugugua

SEQ ID NO: 3336 - RNA, 10 nt, Unknown
  source: /note="Description of Unknown: Exemplary gene or splice site sequence"
uauguaguau

SEQ ID NO: 3337 - RNA, 10 nt, Unknown
  source: /note="Description of Unknown: Exemplary gene or splice site sequence"
uggguaauag

SEQ ID NO: 3338 - RNA, 10 nt, Unknown
  source: /note="Description of Unknown: Exemplary gene or splice site sequence"
caggucugaa

SEQ ID NO: 3339 - RNA, 10 nt, Unknown
  source: /note="Description of Unknown: Exemplary gene or splice site sequence"
aaaguauaaa

SEQ ID NO: 3340 - RNA, 10 nt, Unknown
  source: /note="Description of Unknown: Exemplary gene or splice site sequence"
guggugaguc

SEQ ID NO: 3341 - RNA, 10 nt, Unknown
  source: /note="Description of Unknown: Exemplary gene or splice site sequence"
agugugauua

SEQ ID NO: 3342 - RNA, 10 nt, Unknown
  source: /note="Description of Unknown: Exemplary gene or splice site sequence"
gaaguuguag

SEQ ID NO: 3343 - RNA, 10 nt, Unknown
  source: /note="Description of Unknown: Exemplary gene or splice site sequence"
gguguuaaua

SEQ ID NO: 3344 - RNA, 10 nt, Unknown
  source: /note="Description of Unknown: Exemplary gene or splice site sequence"
caaguacucg

SEQ ID NO: 3345 - RNA, 10 nt, Unknown
  source: /note="Description of Unknown: Exemplary gene or splice site sequence"
acggugaggg

SEQ ID NO: 3346 - RNA, 10 nt, Unknown
  source: /note="Description of Unknown: Exemplary gene or splice site sequence"
ugagcaggca

SEQ ID NO: 3347 - RNA, 10 nt, Unknown
  source: /note="Description of Unknown: Exemplary gene or splice site sequence"
ggggugaccg

SEQ ID NO: 3348 - RNA, 10 nt, Unknown
  source: /note="Description of Unknown: Exemplary gene or splice site sequence"
cggguuugug

SEQ ID NO: 3349 - RNA, 10 nt, Unknown
  source: /note="Description of Unknown: Exemplary gene or splice site sequence"
gugguaugga

SEQ ID NO: 3350 - RNA, 10 nt, Unknown
  source: /note="Description of Unknown: Exemplary gene or splice site sequence"
aaggcgggaa

SEQ ID NO: 3351 - RNA, 10 nt, Unknown
  source: /note="Description of Unknown: Exemplary gene or splice site sequence"
aggguaaaac

SEQ ID NO: 3352 - RNA, 10 nt, Unknown
  source: /note="Description of Unknown: Exemplary gene or splice site sequence"
aggguauguu

SEQ ID NO: 3353 - RNA, 10 nt, Unknown
  source: /note="Description of Unknown: Exemplary gene or splice site sequence"
caggcaugua

SEQ ID NO: 3354 - RNA, 10 nt, Unknown
  source: /note="Description of Unknown: Exemplary gene or splice site sequence"
aaggucaugc

SEQ ID NO: 3355 - RNA, 10 nt, Unknown
  source: /note="Description of Unknown: Exemplary gene or splice site sequence"
gauguacguu

SEQ ID NO: 3356 - RNA, 10 nt, Unknown
  source: /note="Description of Unknown: Exemplary gene or splice site sequence"
acaguacgug

SEQ ID NO: 3357 - RNA, 10 nt, Unknown
  source: /note="Description of Unknown: Exemplary gene or splice site sequence"
acgguaccca

SEQ ID NO: 3358 - RNA, 10 nt, Unknown
  source: /note="Description of Unknown: Exemplary gene or splice site sequence"
cagguagugc

SEQ ID NO: 3359 - RNA, 10 nt, Unknown
  source: /note="Description of Unknown: Exemplary gene or splice site sequence"
acaguaagag

SEQ ID NO: 3360 - RNA, 10 nt, Unknown
  source: /note="Description of Unknown: Exemplary gene or splice site sequence"
ggugcacacc

SEQ ID NO: 3361 - RNA, 10 nt, Unknown
  source: /note="Description of Unknown: Exemplary gene or splice site sequence"
gagguguaac

SEQ ID NO: 3362 - RNA, 10 nt, Unknown
  source: /note="Description of Unknown: Exemplary gene or splice site sequence"
uagguacuua

SEQ ID NO: 3363 - RNA, 10 nt, Unknown
  source: /note="Description of Unknown: Exemplary gene or splice site sequence"
gcgguacugc

SEQ ID NO: 3364 - RNA, 10 nt, Unknown
  source: /note="Description of Unknown: Exemplary gene or splice site sequence"
cagguaggau

SEQ ID NO: 3365 - RNA, 10 nt, Unknown
  source: /note="Description of Unknown: Exemplary gene or splice site sequence"
caggucuggc

SEQ ID NO: 3366 - RNA, 10 nt, Unknown
  source: /note="Description of Unknown: Exemplary gene or splice site sequence"
gugguuuuaa

SEQ ID NO: 3367 - RNA, 10 nt, Unknown
  source: /note="Description of Unknown: Exemplary gene or splice site sequence"
cgagugagcc

SEQ ID NO: 3368 - RNA, 10 nt, Unknown
  source: /note="Description of Unknown: Exemplary gene or splice site sequence"
aguguuguca

SEQ ID NO: 3369 - RNA, 10 nt, Unknown
  source: /note="Description of Unknown: Exemplary gene or splice site sequence"
uaaguauguu

SEQ ID NO: 3370 - RNA, 10 nt, Unknown
  source: /note="Description of Unknown: Exemplary gene or splice site sequence"
aagguugagc

SEQ ID NO: 3371 - RNA, 10 nt, Unknown
  source: /note="Description of Unknown: Exemplary gene or splice site sequence"
gguguaagua

SEQ ID NO: 3372 - RNA, 10 nt, Unknown
  source: /note="Description of Unknown: Exemplary gene or splice site sequence"
cagguauaau

SEQ ID NO: 3373 - RNA, 10 nt, Unknown
  source: /note="Description of Unknown: Exemplary gene or splice site sequence"
augguaccaa

SEQ ID NO: 3374 - RNA, 10 nt, Unknown
  source: /note="Description of Unknown: Exemplary gene or splice site sequence"
ugagucagaa

SEQ ID NO: 3375 - RNA, 10 nt, Unknown
  source: /note="Description of Unknown: Exemplary gene or splice site sequence"
aaggcaauua

SEQ ID NO: 3376 - RNA, 10 nt, Unknown
  source: /note="Description of Unknown: Exemplary gene or splice site sequence"
uugguaagau

SEQ ID NO: 3377 - RNA, 10 nt, Unknown
  source: /note="Description of Unknown: Exemplary gene or splice site sequence"
agaguuagag

SEQ ID NO: 3378 - RNA, 10 nt, Unknown
  source: /note="Description of Unknown: Exemplary gene or splice site sequence"
gagguauuac

SEQ ID NO: 3379 - RNA, 10 nt, Unknown
  source: /note="Description of Unknown: Exemplary gene or splice site sequence"
acgguacaga

SEQ ID NO: 3380 - RNA, 10 nt, Unknown
  source: /note="Description of Unknown: Exemplary gene or splice site sequence"
aguguaggcu

SEQ ID NO: 3381 - RNA, 10 nt, Unknown
  source: /note="Description of Unknown: Exemplary gene or splice site sequence"
aaaguaagcg

SEQ ID NO: 3382 - RNA, 10 nt, Unknown
  source: /note="Description of Unknown: Exemplary gene or splice site sequence"
ccuguaagcc

SEQ ID NO: 3383 - RNA, 10 nt, Unknown
  source: /note="Description of Unknown: Exemplary gene or splice site sequence"
agggugauuu

SEQ ID NO: 3384 - RNA, 10 nt, Unknown
  source: /note="Description of Unknown: Exemplary gene or splice site sequence"
uguguaugaa

SEQ ID NO: 3385 - RNA, 10 nt, Unknown
  source: /note="Description of Unknown: Exemplary gene or splice site sequence"
cugguacaca

SEQ ID NO: 3386 - RNA, 10 nt, Unknown
  source: /note="Description of Unknown: Exemplary gene or splice site sequence"
aggguagaga

SEQ ID NO: 3387 - RNA, 10 nt, Unknown
  source: /note="Description of Unknown: Exemplary gene or splice site sequence"
agaguaugua

SEQ ID NO: 3388 - RNA, 10 nt, Unknown
  source: /note="Description of Unknown: Exemplary gene or splice site sequence"
uuggucagca

SEQ ID NO: 3389 - RNA, 10 nt, Unknown
  source: /note="Description of Unknown: Exemplary gene or splice site sequence"
agggugcggg

SEQ ID NO: 3390 - RNA, 10 nt, Unknown
  source: /note="Description of Unknown: Exemplary gene or splice site sequence"
aaagugauga

SEQ ID NO: 3391 - RNA, 10 nt, Unknown
  source: /note="Description of Unknown: Exemplary gene or splice site sequence"
ugcgugagua

SEQ ID NO: 3392 - RNA, 10 nt, Unknown
  source: /note="Description of Unknown: Exemplary gene or splice site sequence"
aagguacaca

SEQ ID NO: 3393 - RNA, 10 nt, Unknown
  source: /note="Description of Unknown: Exemplary gene or splice site sequence"
gcggugagau

SEQ ID NO: 3394 - RNA, 10 nt, Unknown
  source: /note="Description of Unknown: Exemplary gene or splice site sequence"
ccuguagguu

SEQ ID NO: 3395 - RNA, 10 nt, Unknown
  source: /note="Description of Unknown: Exemplary gene or splice site sequence"
aaggugauuc

SEQ ID NO: 3396 - RNA, 10 nt, Unknown
  source: /note="Description of Unknown: Exemplary gene or splice site sequence"
guuguaagug

SEQ ID NO: 3397 - RNA, 10 nt, Unknown
  source: /note="Description of Unknown: Exemplary gene or splice site sequence"
auaguaggga

SEQ ID NO: 3398 - RNA, 10 nt, Unknown
  source: /note="Description of Unknown: Exemplary gene or splice site sequence"
gggguucgcu

SEQ ID NO: 3399 - RNA, 10 nt, Unknown
  source: /note="Description of Unknown: Exemplary gene or splice site sequence"
ccggucagag

SEQ ID NO: 3400 - RNA, 10 nt, Unknown
  source: /note="Description of Unknown: Exemplary gene or splice site sequence"
guaguaugag

SEQ ID NO: 3401 - RNA, 10 nt, Unknown
  source: /note="Description of Unknown: Exemplary gene or splice site sequence"
cguguaagau

SEQ ID NO: 3402 - RNA, 10 nt, Unknown
  source: /note="Description of Unknown: Exemplary gene or splice site sequence"
ugaguaggca

SEQ ID NO: 3403 - RNA, 10 nt, Unknown
  source: /note="Description of Unknown: Exemplary gene or splice site sequence"
ucaguaugua

SEQ ID NO: 3404 - RNA, 10 nt, Unknown
  source: /note="Description of Unknown: Exemplary gene or splice site sequence"
agaguauuuu

SEQ ID NO: 3405 - RNA, 10 nt, Unknown
  source: /note="Description of Unknown: Exemplary gene or splice site sequence"
aagguuguag

SEQ ID NO: 3406 - RNA, 10 nt, Unknown
  source: /note="Description of Unknown: Exemplary gene or splice site sequence"
ucggugcgga

SEQ ID NO: 3407 - RNA, 10 nt, Unknown
  source: /note="Description of Unknown: Exemplary gene or splice site sequence"
gaaguuagau

SEQ ID NO: 3408 - RNA, 10 nt, Unknown
  source: /note="Description of Unknown: Exemplary gene or splice site sequence"
gcugugagac

SEQ ID NO: 3409 - RNA, 10 nt, Unknown
  source: /note="Description of Unknown: Exemplary gene or splice site sequence"
caggcaggua

SEQ ID NO: 3410 - RNA, 10 nt, Unknown
  source: /note="Description of Unknown: Exemplary gene or splice site sequence"
uaaguuaaga

SEQ ID NO: 3411 - RNA, 10 nt, Unknown
  source: /note="Description of Unknown: Exemplary gene or splice site sequence"
gaggcaggca

SEQ ID NO: 3412 - RNA, 10 nt, Unknown
  source: /note="Description of Unknown: Exemplary gene or splice site sequence"
aaggugccua

SEQ ID NO: 3413 - RNA, 10 nt, Unknown
  source: /note="Description of Unknown: Exemplary gene or splice site sequence"
cgggugugag

SEQ ID NO: 3414 - RNA, 10 nt, Unknown
  source: /note="Description of Unknown: Exemplary gene or splice site sequence"
ggggugugag

SEQ ID NO: 3415 - RNA, 10 nt, Unknown
  source: /note="Description of Unknown: Exemplary gene or splice site sequence"
uccguggguc

SEQ ID NO: 3416 - RNA, 10 nt, Unknown
  source: /note="Description of Unknown: Exemplary gene or splice site sequence"
acgguaaauc

SEQ ID NO: 3417 - RNA, 10 nt, Unknown
  source: /note="Description of Unknown: Exemplary gene or splice site sequence"
ucaguaggua

SEQ ID NO: 3418 - RNA, 10 nt, Unknown
  source: /note="Description of Unknown: Exemplary gene or splice site sequence"
caggcggugg

SEQ ID NO: 3419 - RNA, 10 nt, Unknown
  source: /note="Description of Unknown: Exemplary gene or splice site sequence"
cgaguaagcu

SEQ ID NO: 3420 - RNA, 10 nt, Unknown
  source: /note="Description of Unknown: Exemplary gene or splice site sequence"
cccgugagca

SEQ ID NO: 3421 - RNA, 10 nt, Unknown
  source: /note="Description of Unknown: Exemplary gene or splice site sequence"
aaaguaauga

SEQ ID NO: 3422 - RNA, 10 nt, Unknown
  source: /note="Description of Unknown: Exemplary gene or splice site sequence"
cggguaacca

SEQ ID NO: 3423 - RNA, 10 nt, Unknown
  source: /note="Description of Unknown: Exemplary gene or splice site sequence"
caggucgcac

SEQ ID NO: 3424 - RNA, 10 nt, Unknown
  source: /note="Description of Unknown: Exemplary gene or splice site sequence"
gagguaggcc

SEQ ID NO: 3425 - RNA, 10 nt, Unknown
  source: /note="Description of Unknown: Exemplary gene or splice site sequence"
uagguaggca

SEQ ID NO: 3426 - RNA, 10 nt, Unknown
  source: /note="Description of Unknown: Exemplary gene or splice site sequence"
gcggugcgug

SEQ ID NO: 3427 - RNA, 10 nt, Unknown
  source: /note="Description of Unknown: Exemplary gene or splice site sequence"
gaggucacac

SEQ ID NO: 3428 - RNA, 10 nt, Unknown
  source: /note="Description of Unknown: Exemplary gene or splice site sequence"
cagguaggcc

SEQ ID NO: 3429 - RNA, 10 nt, Unknown
  source: /note="Description of Unknown: Exemplary gene or splice site sequence"
caagugcuga

SEQ ID NO: 3430 - RNA, 10 nt, Unknown
  source: /note="Description of Unknown: Exemplary gene or splice site sequence"
gucgucuuca

SEQ ID NO: 3431 - RNA, 10 nt, Unknown
  source: /note="Description of Unknown: Exemplary gene or splice site sequence"
guaguaagga

SEQ ID NO: 3432 - RNA, 10 nt, Unknown
  source: /note="Description of Unknown: Exemplary gene or splice site sequence"
caaguuagag

SEQ ID NO: 3433 - RNA, 10 nt, Unknown
  source: /note="Description of Unknown: Exemplary gene or splice site sequence"
acagugaauc

SEQ ID NO: 3434 - RNA, 10 nt, Unknown
  source: /note="Description of Unknown: Exemplary gene or splice site sequence"
aagguaguau

SEQ ID NO: 3435 - RNA, 10 nt, Unknown
  source: /note="Description of Unknown: Exemplary gene or splice site sequence"
acugucaguc

SEQ ID NO: 3436 - RNA, 10 nt, Unknown
  source: /note="Description of Unknown: Exemplary gene or splice site sequence"
ucugcagccu

SEQ ID NO: 3437 - RNA, 10 nt, Unknown
  source: /note="Description of Unknown: Exemplary gene or splice site sequence"
cgaguaagug

SEQ ID NO: 3438 - RNA, 10 nt, Unknown
  source: /note="Description of Unknown: Exemplary gene or splice site sequence"
agaguaauua

SEQ ID NO: 3439 - RNA, 10 nt, Unknown
  source: /note="Description of Unknown: Exemplary gene or splice site sequence"
ccggugagcg

SEQ ID NO: 3440 - RNA, 10 nt, Unknown
  source: /note="Description of Unknown: Exemplary gene or splice site sequence"
aagguaaccu

SEQ ID NO: 3441 - RNA, 10 nt, Unknown
  source: /note="Description of Unknown: Exemplary gene or splice site sequence"
aagguugugg

SEQ ID NO: 3442 - RNA, 10 nt, Unknown
  source: /note="Description of Unknown: Exemplary gene or splice site sequence"
aaggcauggg

SEQ ID NO: 3443 - RNA, 10 nt, Unknown
  source: /note="Description of Unknown: Exemplary gene or splice site sequence"
acgguaaggu

SEQ ID NO: 3444 - RNA, 10 nt, Unknown
  source: /note="Description of Unknown: Exemplary gene or splice site sequence"
ggggugagca

SEQ ID NO: 3445 - RNA, 10 nt, Unknown
  source: /note="Description of Unknown: Exemplary gene or splice site sequence"
gagguugcuu

SEQ ID NO: 3446 - RNA, 10 nt, Unknown
  source: /note="Description of Unknown: Exemplary gene or splice site sequence"
aagguaucgc

SEQ ID NO: 3447 - RNA, 10 nt, Unknown
  source: /note="Description of Unknown: Exemplary gene or splice site sequence"
ccgguaaagg

SEQ ID NO: 3448 - RNA, 10 nt, Unknown
  source: /note="Description of Unknown: Exemplary gene or splice site sequence"
aaaguuaaug

SEQ ID NO: 3449 - RNA, 10 nt, Unknown
  source: /note="Description of Unknown: Exemplary gene or splice site sequence"
accguaauua

SEQ ID NO: 3450 - RNA, 10 nt, Unknown
  source: /note="Description of Unknown: Exemplary gene or splice site sequence"
ccgguaacgc

SEQ ID NO: 3451 - RNA, 10 nt, Unknown
  source: /note="Description of Unknown: Exemplary gene or splice site sequence"
augguaauua

SEQ ID NO: 3452 - RNA, 10 nt, Unknown
  source: /note="Description of Unknown: Exemplary gene or splice site sequence"
aaggugacuc

SEQ ID NO: 3453 - RNA, 10 nt, Unknown
  source: /note="Description of Unknown: Exemplary gene or splice site sequence"
aggguaaaaa

SEQ ID NO: 3454 - RNA, 10 nt, Unknown
  source: /note="Description of Unknown: Exemplary gene or splice site sequence"
gaggugugac

SEQ ID NO: 3455 - RNA, 10 nt, Unknown
  source: /note="Description of Unknown: Exemplary gene or splice site sequence"
cacguaagcu

SEQ ID NO: 3456 - RNA, 10 nt, Unknown
  source: /note="Description of Unknown: Exemplary gene or splice site sequence"
cagguccccc

SEQ ID NO: 3457 - RNA, 10 nt, Unknown
  source: /note="Description of Unknown: Exemplary gene or splice site sequence"
caggucaggu

SEQ ID NO: 3458 - RNA, 10 nt, Unknown
  source: /note="Description of Unknown: Exemplary gene or splice site sequence"
cggguaaguc

SEQ ID NO: 3459 - RNA, 10 nt, Unknown
  source: /note="Description of Unknown: Exemplary gene or splice site sequence"
acgguauggg

SEQ ID NO: 3460 - RNA, 10 nt, Unknown
  source: /note="Description of Unknown: Exemplary gene or splice site sequence"
caaguaauau

SEQ ID NO: 3461 - RNA, 10 nt, Unknown
  source: /note="Description of Unknown: Exemplary gene or splice site sequence"
cagguugggg

SEQ ID NO: 3462 - RNA, 10 nt, Unknown
  source: /note="Description of Unknown: Exemplary gene or splice site sequence"
ccugugcugg

SEQ ID NO: 3463 - RNA, 10 nt, Unknown
  source: /note="Description of Unknown: Exemplary gene or splice site sequence"
aggguagagg

SEQ ID NO: 3464 - RNA, 10 nt, Unknown
  source: /note="Description of Unknown: Exemplary gene or splice site sequence"
aggguagggc

SEQ ID NO: 3465 - RNA, 10 nt, Unknown
  source: /note="Description of Unknown: Exemplary gene or splice site sequence"
guggugagua

SEQ ID NO: 3466 - RNA, 10 nt, Unknown
  source: /note="Description of Unknown: Exemplary gene or splice site sequence"
aauguauauc

SEQ ID NO: 3467 - RNA, 10 nt, Unknown
  source: /note="Description of Unknown: Exemplary gene or splice site sequence"
agggugaggc

SEQ ID NO: 3468 - RNA, 10 nt, Unknown
  source: /note="Description of Unknown: Exemplary gene or splice site sequence"
ggggugugcu

SEQ ID NO: 3469 - RNA, 10 nt, Unknown
  source: /note="Description of Unknown: Exemplary gene or splice site sequence"
aauguaaccu

SEQ ID NO: 3470 - RNA, 10 nt, Unknown
  source: /note="Description of Unknown: Exemplary gene or splice site sequence"
caggugcacu

SEQ ID NO: 3471 - RNA, 10 nt, Unknown
  source: /note="Description of Unknown: Exemplary gene or splice site sequence"
gagguauccu

SEQ ID NO: 3472 - RNA, 10 nt, Unknown
  source: /note="Description of Unknown: Exemplary gene or splice site sequence"
uguguaagug

SEQ ID NO: 3473 - RNA, 10 nt, Unknown
  source: /note="Description of Unknown: Exemplary gene or splice site sequence"
ccagcaaggc

SEQ ID NO: 3474 - RNA, 10 nt, Unknown
  source: /note="Description of Unknown: Exemplary gene or splice site sequence"
aauguggggu

SEQ ID NO: 3475 - RNA, 10 nt, Unknown
  source: /note="Description of Unknown: Exemplary gene or splice site sequence"
ucggugcgug

SEQ ID NO: 3476 - RNA, 10 nt, Unknown
  source: /note="Description of Unknown: Exemplary gene or splice site sequence"
uugguaaggc

SEQ ID NO: 3477 - RNA, 10 nt, Unknown
  source: /note="Description of Unknown: Exemplary gene or splice site sequence"
gagguaagug

SEQ ID NO: 3478 - RNA, 10 nt, Unknown
  source: /note="Description of Unknown: Exemplary gene or splice site sequence"
uaggucuuuu

SEQ ID NO: 3479 - RNA, 10 nt, Unknown
  source: /note="Description of Unknown: Exemplary gene or splice site sequence"
gaggucugau

SEQ ID NO: 3480 - RNA, 10 nt, Unknown
  source: /note="Description of Unknown: Exemplary gene or splice site sequence"
ccaguuagag

SEQ ID NO: 3481 - RNA, 10 nt, Unknown
  source: /note="Description of Unknown: Exemplary gene or splice site sequence"
ugggugaaaa

SEQ ID NO: 3482 - RNA, 10 nt, Unknown
  source: /note="Description of Unknown: Exemplary gene or splice site sequence"
caggccgguc

SEQ ID NO: 3483 - RNA, 10 nt, Unknown
  source: /note="Description of Unknown: Exemplary gene or splice site sequence"
ccgguaagag

SEQ ID NO: 3484 - RNA, 10 nt, Unknown
  source: /note="Description of Unknown: Exemplary gene or splice site sequence"
cugguaagac

SEQ ID NO: 3485 - RNA, 10 nt, Unknown
  source: /note="Description of Unknown: Exemplary gene or splice site sequence"
cugguuuguu

SEQ ID NO: 3486 - RNA, 10 nt, Unknown
  source: /note="Description of Unknown: Exemplary gene or splice site sequence"
uggguaggua

SEQ ID NO: 3487 - RNA, 10 nt, Unknown
  source: /note="Description of Unknown: Exemplary gene or splice site sequence"
cagguguucg

SEQ ID NO: 3488 - RNA, 10 nt, Unknown
  source: /note="Description of Unknown: Exemplary gene or splice site sequence"
cggguagguc

SEQ ID NO: 3489 - RNA, 10 nt, Unknown
  source: /note="Description of Unknown: Exemplary gene or splice site sequence"
gugguacaua

SEQ ID NO: 3490 - RNA, 10 nt, Unknown
  source: /note="Description of Unknown: Exemplary gene or splice site sequence"
gaugugagua

SEQ ID NO: 3491 - RNA, 10 nt, Unknown
  source: /note="Description of Unknown: Exemplary gene or splice site sequence"
gagguagccg

SEQ ID NO: 3492 - RNA, 10 nt, Unknown
  source: /note="Description of Unknown: Exemplary gene or splice site sequence"
uaggugaucu

SEQ ID NO: 3493 - RNA, 10 nt, Unknown
  source: /note="Description of Unknown: Exemplary gene or splice site sequence"
cuugucaguc

SEQ ID NO: 3494 - RNA, 10 nt, Unknown
  source: /note="Description of Unknown: Exemplary gene or splice site sequence"
gagguaucac

SEQ ID NO: 3495 - RNA, 10 nt, Unknown
  source: /note="Description of Unknown: Exemplary gene or splice site sequence"
gagguaauga

SEQ ID NO: 3496 - RNA, 10 nt, Unknown
  source: /note="Description of Unknown: Exemplary gene or splice site sequence"
aagguaacac

SEQ ID NO: 3497 - RNA, 10 nt, Unknown
  source: /note="Description of Unknown: Exemplary gene or splice site sequence"
aaggcaagua

SEQ ID NO: 3498 - RNA, 10 nt, Unknown
  source: /note="Description of Unknown: Exemplary gene or splice site sequence"
cgcgugagcc

SEQ ID NO: 3499 - RNA, 10 nt, Unknown
  source: /note="Description of Unknown: Exemplary gene or splice site sequence"
agugugcguu

SEQ ID NO: 3500 - RNA, 10 nt, Unknown
  source: /note="Description of Unknown: Exemplary gene or splice site sequence"
ggagcaguug

SEQ ID NO: 3501 - RNA, 10 nt, Unknown
  source: /note="Description of Unknown: Exemplary gene or splice site sequence"
agcguaagau

SEQ ID NO: 3502 - RNA, 10 nt, Unknown
  source: /note="Description of Unknown: Exemplary gene or splice site sequence"
gagguauuca

SEQ ID NO: 3503 - RNA, 10 nt, Unknown
  source: /note="Description of Unknown: Exemplary gene or splice site sequence"
aauguaaagu

SEQ ID NO: 3504 - RNA, 10 nt, Unknown
  source: /note="Description of Unknown: Exemplary gene or splice site sequence"
cagguaacaa

SEQ ID NO: 3505 - RNA, 10 nt, Unknown
  source: /note="Description of Unknown: Exemplary gene or splice site sequence"
ucgguaggug

SEQ ID NO: 3506 - RNA, 10 nt, Unknown
  source: /note="Description of Unknown: Exemplary gene or splice site sequence"
cgggugcagu

SEQ ID NO: 3507 - RNA, 10 nt, Unknown
  source: /note="Description of Unknown: Exemplary gene or splice site sequence"
ggugugugca

SEQ ID NO: 3508 - RNA, 10 nt, Unknown
  source: /note="Description of Unknown: Exemplary gene or splice site sequence"
cacguguaag

SEQ ID NO: 3509 - RNA, 10 nt, Unknown
  source: /note="Description of Unknown: Exemplary gene or splice site sequence"
gugguuggua

SEQ ID NO: 3510 - RNA, 10 nt, Unknown
  source: /note="Description of Unknown: Exemplary gene or splice site sequence"
gcagccuuga

SEQ ID NO: 3511 - RNA, 10 nt, Unknown
  source: /note="Description of Unknown: Exemplary gene or splice site sequence"
cgagugugau

SEQ ID NO: 3512 - RNA, 10 nt, Unknown
  source: /note="Description of Unknown: Exemplary gene or splice site sequence"
cagguauaua

SEQ ID NO: 3513 - RNA, 10 nt, Unknown
  source: /note="Description of Unknown: Exemplary gene or splice site sequence"
cccgugguca

SEQ ID NO: 3514 - RNA, 10 nt, Unknown
  source: /note="Description of Unknown: Exemplary gene or splice site sequence"
aguguauccu

SEQ ID NO: 3515 - RNA, 10 nt, Unknown
  source: /note="Description of Unknown: Exemplary gene or splice site sequence"
ugaguguguc

SEQ ID NO: 3516 - RNA, 10 nt, Unknown
  source: /note="Description of Unknown: Exemplary gene or splice site sequence"
uggguaaucu

SEQ ID NO: 3517 - RNA, 10 nt, Unknown
  source: /note="Description of Unknown: Exemplary gene or splice site sequence"
auggcagguu

SEQ ID NO: 3518 - RNA, 10 nt, Unknown
  source: /note="Description of Unknown: Exemplary gene or splice site sequence"
ucagcagcgu

SEQ ID NO: 3519 - RNA, 10 nt, Unknown
  source: /note="Description of Unknown: Exemplary gene or splice site sequence"
cgggugcgcu

SEQ ID NO: 3520 - RNA, 10 nt, Unknown
  source: /note="Description of Unknown: Exemplary gene or splice site sequence"
agcgugguaa

SEQ ID NO: 3521 - RNA, 10 nt, Unknown
  source: /note="Description of Unknown: Exemplary gene or splice site sequence"
aaugugaaug

SEQ ID NO: 3522 - RNA, 10 nt, Unknown
  source: /note="Description of Unknown: Exemplary gene or splice site sequence"
ucggugagac

SEQ ID NO: 3523 - RNA, 10 nt, Unknown
  source: /note="Description of Unknown: Exemplary gene or splice site sequence"
uagguaaagc

SEQ ID NO: 3524 - RNA, 10 nt, Unknown
  source: /note="Description of Unknown: Exemplary gene or splice site sequence"
cugguaaaag

SEQ ID NO: 3525 - RNA, 10 nt, Unknown
  source: /note="Description of Unknown: Exemplary gene or splice site sequence"
ccggugcgga

SEQ ID NO: 3526 - RNA, 10 nt, Unknown
  source: /note="Description of Unknown: Exemplary gene or splice site sequence"
cagguacuca

SEQ ID NO: 3527 - RNA, 10 nt, Unknown
  source: /note="Description of Unknown: Exemplary gene or splice site sequence"
gaaguugagu

SEQ ID NO: 3528 - RNA, 10 nt, Unknown
  source: /note="Description of Unknown: Exemplary gene or splice site sequence"
uagguaugcu

SEQ ID NO: 3529 - RNA, 10 nt, Unknown
  source: /note="Description of Unknown: Exemplary gene or splice site sequence"
cguguaagcc

SEQ ID NO: 3530 - RNA, 10 nt, Unknown
  source: /note="Description of Unknown: Exemplary gene or splice site sequence"
ucggcaaggc

SEQ ID NO: 3531 - RNA, 10 nt, Unknown
  source: /note="Description of Unknown: Exemplary gene or splice site sequence"
gagguucucg

SEQ ID NO: 3532 - RNA, 10 nt, Unknown
  source: /note="Description of Unknown: Exemplary gene or splice site sequence"
aaggcaugug

SEQ ID NO: 3533 - RNA, 10 nt, Unknown
  source: /note="Description of Unknown: Exemplary gene or splice site sequence"
uaagucauuu

SEQ ID NO: 3534 - RNA, 10 nt, Unknown
  source: /note="Description of Unknown: Exemplary gene or splice site sequence"
aauguaaaga

SEQ ID NO: 3535 - RNA, 10 nt, Unknown
  source: /note="Description of Unknown: Exemplary gene or splice site sequence"
uaggugcuca

SEQ ID NO: 3536 - RNA, 10 nt, Unknown
  source: /note="Description of Unknown: Exemplary gene or splice site sequence"
gagguacuga

SEQ ID NO: 3537 - RNA, 10 nt, Unknown
  source: /note="Description of Unknown: Exemplary gene or splice site sequence"
uggguaaaaa

SEQ ID NO: 3538 - RNA, 10 nt, Unknown
  source: /note="Description of Unknown: Exemplary gene or splice site sequence"
uacgugaguu

SEQ ID NO: 3539 - RNA, 10 nt, Unknown
  source: /note="Description of Unknown: Exemplary gene or splice site sequence"
cgggugagga

SEQ ID NO: 3540 - RNA, 10 nt, Unknown
  source: /note="Description of Unknown: Exemplary gene or splice site sequence"
gguguaagcu

SEQ ID NO: 3541 - RNA, 10 nt, Unknown
  source: /note="Description of Unknown: Exemplary gene or splice site sequence"
ccagcuaagu

SEQ ID NO: 3542 - RNA, 10 nt, Unknown
  source: /note="Description of Unknown: Exemplary gene or splice site sequence"
gagguaccuc

SEQ ID NO: 3543 - RNA, 10 nt, Unknown
  source: /note="Description of Unknown: Exemplary gene or splice site sequence"
gagguuagga

SEQ ID NO: 3544 - RNA, 10 nt, Unknown
  source: /note="Description of Unknown: Exemplary gene or splice site sequence"
ugcgugugua

SEQ ID NO: 3545 - RNA, 10 nt, Unknown
  source: /note="Description of Unknown: Exemplary gene or splice site sequence"
ccaguaacca

SEQ ID NO: 3546 - RNA, 10 nt, Unknown
  source: /note="Description of Unknown: Exemplary gene or splice site sequence"
agggucuguc

SEQ ID NO: 3547 - RNA, 10 nt, Unknown
  source: /note="Description of Unknown: Exemplary gene or splice site sequence"
cagguaaccu

SEQ ID NO: 3548 - RNA, 10 nt, Unknown
  source: /note="Description of Unknown: Exemplary gene or splice site sequence"
uagguucgug

SEQ ID NO: 3549 - RNA, 10 nt, Unknown
  source: /note="Description of Unknown: Exemplary gene or splice site sequence"
aaaguuagua

SEQ ID NO: 3550 - RNA, 10 nt, Unknown
  source: /note="Description of Unknown: Exemplary gene or splice site sequence"
aaggcacagu

SEQ ID NO: 3551 - RNA, 10 nt, Unknown
  source: /note="Description of Unknown: Exemplary gene or splice site sequence"
cuugcauggg

SEQ ID NO: 3552 - RNA, 10 nt, Unknown
  source: /note="Description of Unknown: Exemplary gene or splice site sequence"
gcggugagua

SEQ ID NO: 3553 - RNA, 10 nt, Unknown
  source: /note="Description of Unknown: Exemplary gene or splice site sequence"
gggguaagcg

SEQ ID NO: 3554 - RNA, 10 nt, Unknown
  source: /note="Description of Unknown: Exemplary gene or splice site sequence"
gccguaagaa

SEQ ID NO: 3555 - RNA, 10 nt, Unknown
  source: /note="Description of Unknown: Exemplary gene or splice site sequence"
gaggucggga

SEQ ID NO: 3556 - RNA, 10 nt, Unknown
  source: /note="Description of Unknown: Exemplary gene or splice site sequence"
agugugagac

SEQ ID NO: 3557 - RNA, 10 nt, Unknown
  source: /note="Description of Unknown: Exemplary gene or splice site sequence"
ccgguggguc

SEQ ID NO: 3558 - RNA, 10 nt, Unknown
  source: /note="Description of Unknown: Exemplary gene or splice site sequence"
uggguaacgu

SEQ ID NO: 3559 - RNA, 10 nt, Unknown
  source: /note="Description of Unknown: Exemplary gene or splice site sequence"
uuggugagag

SEQ ID NO: 3560 - RNA, 10 nt, Unknown
  source: /note="Description of Unknown: Exemplary gene or splice site sequence"
uagguacccu

SEQ ID NO: 3561 - RNA, 10 nt, Unknown
  source: /note="Description of Unknown: Exemplary gene or splice site sequence"
ggggugcguc

SEQ ID NO: 3562 - RNA, 10 nt, Unknown
  source: /note="Description of Unknown: Exemplary gene or splice site sequence"
aaggcaggag

SEQ ID NO: 3563 - RNA, 10 nt, Unknown
  source: /note="Description of Unknown: Exemplary gene or splice site sequence"
acgguacauu

SEQ ID NO: 3564 - RNA, 10 nt, Unknown
  source: /note="Description of Unknown: Exemplary gene or splice site sequence"
augguauacu

SEQ ID NO: 3565 - RNA, 10 nt, Unknown
  source: /note="Description of Unknown: Exemplary gene or splice site sequence"
acaguaacga

SEQ ID NO: 3566 - RNA, 10 nt, Unknown
  source: /note="Description of Unknown: Exemplary gene or splice site sequence"
cugguaccca

SEQ ID NO: 3567 - RNA, 10 nt, Unknown
  source: /note="Description of Unknown: Exemplary gene or splice site sequence"
cagguaaccc

SEQ ID NO: 3568 - RNA, 10 nt, Unknown
  source: /note="Description of Unknown: Exemplary gene or splice site sequence"
ggaguaagua

SEQ ID NO: 3569 - RNA, 10 nt, Unknown
  source: /note="Description of Unknown: Exemplary gene or splice site sequence"
acuguauguc

SEQ ID NO: 3570 - RNA, 10 nt, Unknown
  source: /note="Description of Unknown: Exemplary gene or splice site sequence"
cugguaaugu

SEQ ID NO: 3571 - RNA, 10 nt, Unknown
  source: /note="Description of Unknown: Exemplary gene or splice site sequence"
agugucagug

SEQ ID NO: 3572 - RNA, 10 nt, Unknown
  source: /note="Description of Unknown: Exemplary gene or splice site sequence"
ggaguaugug

SEQ ID NO: 3573 - RNA, 10 nt, Unknown
  source: /note="Description of Unknown: Exemplary gene or splice site sequence"
ccuguuguga

SEQ ID NO: 3574 - RNA, 10 nt, Unknown
  source: /note="Description of Unknown: Exemplary gene or splice site sequence"
cagguaagca

SEQ ID NO: 3575 - RNA, 10 nt, Unknown
  source: /note="Description of Unknown: Exemplary gene or splice site sequence"
caggucacag

SEQ ID NO: 3576 - RNA, 10 nt, Unknown
  source: /note="Description of Unknown: Exemplary gene or splice site sequence"
uagguuugcg

SEQ ID NO: 3577 - RNA, 10 nt, Unknown
  source: /note="Description of Unknown: Exemplary gene or splice site sequence"
acgguuguau

SEQ ID NO: 3578 - RNA, 10 nt, Unknown
  source: /note="Description of Unknown: Exemplary gene or splice site sequence"
gggguuaguu

SEQ ID NO: 3579 - RNA, 10 nt, Unknown
  source: /note="Description of Unknown: Exemplary gene or splice site sequence"
acgguaaggc

SEQ ID NO: 3580 - RNA, 10 nt, Unknown
  source: /note="Description of Unknown: Exemplary gene or splice site sequence"
ggggugagag

SEQ ID NO: 3581 - RNA, 10 nt, Unknown
  source: /note="Description of Unknown: Exemplary gene or splice site sequence"
caggcaggcc

SEQ ID NO: 3582 - RNA, 10 nt, Unknown
  source: /note="Description of Unknown: Exemplary gene or splice site sequence"
cacgugcagg

SEQ ID NO: 3583 - RNA, 10 nt, Unknown
  source: /note="Description of Unknown: Exemplary gene or splice site sequence"
gcgguauaau

SEQ ID NO: 3584 - RNA, 10 nt, Unknown
  source: /note="Description of Unknown: Exemplary gene or splice site sequence"
uagguaaagu

SEQ ID NO: 3585 - RNA, 10 nt, Unknown
  source: /note="Description of Unknown: Exemplary gene or splice site sequence"
uagguggauu

SEQ ID NO: 3586 - RNA, 10 nt, Unknown
  source: /note="Description of Unknown: Exemplary gene or splice site sequence"
gaggucugga

SEQ ID NO: 3587 - RNA, 10 nt, Unknown
  source: /note="Description of Unknown: Exemplary gene or splice site sequence"
ucggucaguu

SEQ ID NO: 3588 - RNA, 10 nt, Unknown
  source: /note="Description of Unknown: Exemplary gene or splice site sequence"
uggguaacug

SEQ ID NO: 3589 - RNA, 10 nt, Unknown
  source: /note="Description of Unknown: Exemplary gene or splice site sequence"
aagguuugau

SEQ ID NO: 3590 - RNA, 10 nt, Unknown
  source: /note="Description of Unknown: Exemplary gene or splice site sequence"
ugugcuggug

SEQ ID NO: 3591 - RNA, 10 nt, Unknown
  source: /note="Description of Unknown: Exemplary gene or splice site sequence"
uguguaccuc

SEQ ID NO: 3592 - RNA, 10 nt, Unknown
  source: /note="Description of Unknown: Exemplary gene or splice site sequence"
aucgucagcg

SEQ ID NO: 3593 - RNA, 10 nt, Unknown
  source: /note="Description of Unknown: Exemplary gene or splice site sequence"
caggucuugg

SEQ ID NO: 3594 - RNA, 10 nt, Unknown
  source: /note="Description of Unknown: Exemplary gene or splice site sequence"
gaaguuggua

SEQ ID NO: 3595 - RNA, 10 nt, Unknown
  source: /note="Description of Unknown: Exemplary gene or splice site sequence"
gaaguaaaga

SEQ ID NO: 3596 - RNA, 10 nt, Unknown
  source: /note="Description of Unknown: Exemplary gene or splice site sequence"
aggguaucau

SEQ ID NO: 3597 - RNA, 10 nt, Unknown
  source: /note="Description of Unknown: Exemplary gene or splice site sequence"
uggguuguuu

SEQ ID NO: 3598 - RNA, 10 nt, Unknown
  source: /note="Description of Unknown: Exemplary gene or splice site sequence"
agcgugagau

SEQ ID NO: 3599 - RNA, 10 nt, Unknown
  source: /note="Description of Unknown: Exemplary gene or splice site sequence"
aggguagaug

SEQ ID NO: 3600 - RNA, 10 nt, Unknown
  source: /note="Description of Unknown: Exemplary gene or splice site sequence"
aucgcgugag

SEQ ID NO: 3601 - RNA, 10 nt, Unknown
  source: /note="Description of Unknown: Exemplary gene or splice site sequence"
aggguaagcc

SEQ ID NO: 3602 - RNA, 10 nt, Unknown
  source: /note="Description of Unknown: Exemplary gene or splice site sequence"
aggguagcag

SEQ ID NO: 3603 - RNA, 10 nt, Unknown
  source: /note="Description of Unknown: Exemplary gene or splice site sequence"
uucguuuccg

SEQ ID NO: 3604 - RNA, 10 nt, Unknown
  source: /note="Description of Unknown: Exemplary gene or splice site sequence"
cagguauggc

SEQ ID NO: 3605 - RNA, 10 nt, Unknown
  source: /note="Description of Unknown: Exemplary gene or splice site sequence"
aagguagaga

SEQ ID NO: 3606 - RNA, 10 nt, Unknown
  source: /note="Description of Unknown: Exemplary gene or splice site sequence"
acgguaauaa

SEQ ID NO: 3607 - RNA, 10 nt, Unknown
  source: /note="Description of Unknown: Exemplary gene or splice site sequence"
cugguacggu

SEQ ID NO: 3608 - RNA, 10 nt, Unknown
  source: /note="Description of Unknown: Exemplary gene or splice site sequence"
gaggucacag

SEQ ID NO: 3609 - RNA, 10 nt, Unknown
  source: /note="Description of Unknown: Exemplary gene or splice site sequence"
cugguacgcc

SEQ ID NO: 3610 - RNA, 10 nt, Unknown
  source: /note="Description of Unknown: Exemplary gene or splice site sequence"
ccgguaaccg

SEQ ID NO: 3611 - RNA, 10 nt, Unknown
  source: /note="Description of Unknown: Exemplary gene or splice site sequence"
cuuguaaguc

SEQ ID NO: 3612 - RNA, 10 nt, Unknown
  source: /note="Description of Unknown: Exemplary gene or splice site sequence"
accguaugua

SEQ ID NO: 3613 - RNA, 10 nt, Unknown
  source: /note="Description of Unknown: Exemplary gene or splice site sequence"
cggguacuuu

SEQ ID NO: 3614 - RNA, 10 nt, Unknown
  source: /note="Description of Unknown: Exemplary gene or splice site sequence"
aagguaugcg

SEQ ID NO: 3615 - RNA, 10 nt, Unknown
  source: /note="Description of Unknown: Exemplary gene or splice site sequence"
ccuguaggcu

SEQ ID NO: 3616 - RNA, 10 nt, Unknown
  source: /note="Description of Unknown: Exemplary gene or splice site sequence"
acaguagaaa

SEQ ID NO: 3617 - RNA, 10 nt, Unknown
  source: /note="Description of Unknown: Exemplary gene or splice site sequence"
ccgguuagua

SEQ ID NO: 3618 - RNA, 10 nt, Unknown
  source: /note="Description of Unknown: Exemplary gene or splice site sequence"
cggguaggcg

SEQ ID NO: 3619 - RNA, 10 nt, Unknown
  source: /note="Description of Unknown: Exemplary gene or splice site sequence"
gaggugaguc

SEQ ID NO: 3620 - RNA, 10 nt, Unknown
  source: /note="Description of Unknown: Exemplary gene or splice site sequence"
cugguagccu

SEQ ID NO: 3621 - RNA, 10 nt, Unknown
  source: /note="Description of Unknown: Exemplary gene or splice site sequence"
gaaguaacuu

SEQ ID NO: 3622 - RNA, 10 nt, Unknown
  source: /note="Description of Unknown: Exemplary gene or splice site sequence"
gaaguaagau

SEQ ID NO: 3623 - RNA, 10 nt, Unknown
  source: /note="Description of Unknown: Exemplary gene or splice site sequence"
guaguucuau

SEQ ID NO: 3624 - RNA, 10 nt, Unknown
  source: /note="Description of Unknown: Exemplary gene or splice site sequence"
gagguacaug

SEQ ID NO: 3625 - RNA, 10 nt, Unknown
  source: /note="Description of Unknown: Exemplary gene or splice site sequence"
uggguaaggc

SEQ ID NO: 3626 - RNA, 10 nt, Unknown
  source: /note="Description of Unknown: Exemplary gene or splice site sequence"
ccaguuacgc

SEQ ID NO: 3627 - RNA, 10 nt, Unknown
  source: /note="Description of Unknown: Exemplary gene or splice site sequence"
acugugguga

SEQ ID NO: 3628 - RNA, 10 nt, Unknown
  source: /note="Description of Unknown: Exemplary gene or splice site sequence"
auuguaggug

SEQ ID NO: 3629 - RNA, 10 nt, Unknown
  source: /note="Description of Unknown: Exemplary gene or splice site sequence"
accgucagug

SEQ ID NO: 3630 - RNA, 10 nt, Unknown
  source: /note="Description of Unknown: Exemplary gene or splice site sequence"
aaugugaggg

SEQ ID NO: 3631 - RNA, 10 nt, Unknown
  source: /note="Description of Unknown: Exemplary gene or splice site sequence"
uggguguggu

SEQ ID NO: 3632 - RNA, 10 nt, Unknown
  source: /note="Description of Unknown: Exemplary gene or splice site sequence"
uccgugagug

SEQ ID NO: 3633 - RNA, 10 nt, Unknown
  source: /note="Description of Unknown: Exemplary gene or splice site sequence"
caggcaagcu

SEQ ID NO: 3634 - RNA, 10 nt, Unknown
  source: /note="Description of Unknown: Exemplary gene or splice site sequence"
aaaguagcag

SEQ ID NO: 3635 - RNA, 10 nt, Unknown
  source: /note="Description of Unknown: Exemplary gene or splice site sequence"
cuugucagug

SEQ ID NO: 3636 - RNA, 10 nt, Unknown
  source: /note="Description of Unknown: Exemplary gene or splice site sequence"
uaggugcgcu

SEQ ID NO: 3637 - RNA, 10 nt, Unknown
  source: /note="Description of Unknown: Exemplary gene or splice site sequence"
gaggcaaauu

SEQ ID NO: 3638 - RNA, 10 nt, Unknown
  source: /note="Description of Unknown: Exemplary gene or splice site sequence"
aggguaccuc

SEQ ID NO: 3639 - RNA, 10 nt, Unknown
  source: /note="Description of Unknown: Exemplary gene or splice site sequence"
caagugcgua

SEQ ID NO: 3640 - RNA, 10 nt, Unknown
  source: /note="Description of Unknown: Exemplary gene or splice site sequence"
gugguaaaua

SEQ ID NO: 3641 - RNA, 10 nt, Unknown
  source: /note="Description of Unknown: Exemplary gene or splice site sequence"
gauguaagcg

SEQ ID NO: 3642 - RNA, 10 nt, Unknown
  source: /note="Description of Unknown: Exemplary gene or splice site sequence"
ccuguacggc

SEQ ID NO: 3643 - RNA, 10 nt, Unknown
  source: /note="Description of Unknown: Exemplary gene or splice site sequence"
uagguccaua

SEQ ID NO: 3644 - RNA, 10 nt, Unknown
  source: /note="Description of Unknown: Exemplary gene or splice site sequence"
aaaguacuga

SEQ ID NO: 3645 - RNA, 10 nt, Unknown
  source: /note="Description of Unknown: Exemplary gene or splice site sequence"
uugguaagcg

SEQ ID NO: 3646 - RNA, 10 nt, Unknown
  source: /note="Description of Unknown: Exemplary gene or splice site sequence"
caggcaagcg

SEQ ID NO: 3647 - RNA, 10 nt, Unknown
  source: /note="Description of Unknown: Exemplary gene or splice site sequence"
uuugcagguu

SEQ ID NO: 3648 - RNA, 10 nt, Unknown
  source: /note="Description of Unknown: Exemplary gene or splice site sequence"
cagguuuaua

SEQ ID NO: 3649 - RNA, 10 nt, Unknown
  source: /note="Description of Unknown: Exemplary gene or splice site sequence"
guaguaaguu

SEQ ID NO: 3650 - RNA, 10 nt, Unknown
  source: /note="Description of Unknown: Exemplary gene or splice site sequence"
cagguaauac

SEQ ID NO: 3651 - RNA, 10 nt, Unknown
  source: /note="Description of Unknown: Exemplary gene or splice site sequence"
caggcaaggc

SEQ ID NO: 3652 - RNA, 10 nt, Unknown
  source: /note="Description of Unknown: Exemplary gene or splice site sequence"
uuuguccgug

SEQ ID NO: 3653 - RNA, 10 nt, Unknown
  source: /note="Description of Unknown: Exemplary gene or splice site sequence"
accgugagug

SEQ ID NO: 3654 - RNA, 10 nt, Unknown
  source: /note="Description of Unknown: Exemplary gene or splice site sequence"
caaguaagcu

SEQ ID NO: 3655 - RNA, 10 nt, Unknown
  source: /note="Description of Unknown: Exemplary gene or splice site sequence"
cagguaaagg

SEQ ID NO: 3656 - RNA, 10 nt, Unknown
  source: /note="Description of Unknown: Exemplary gene or splice site sequence"
aaggcaagcg

SEQ ID NO: 3657 - RNA, 10 nt, Unknown
  source: /note="Description of Unknown: Exemplary gene or splice site sequence"
aguguacgug

SEQ ID NO: 3658 - RNA, 10 nt, Unknown
  source: /note="Description of Unknown: Exemplary gene or splice site sequence"
agggugcgua

SEQ ID NO: 3659 - RNA, 10 nt, Unknown
  source: /note="Description of Unknown: Exemplary gene or splice site sequence"
cgaguuauga

SEQ ID NO: 3660 - RNA, 10 nt, Unknown
  source: /note="Description of Unknown: Exemplary gene or splice site sequence"
uuggugaaga

SEQ ID NO: 3661 - RNA, 10 nt, Unknown
  source: /note="Description of Unknown: Exemplary gene or splice site sequence"
aggguaaugg

SEQ ID NO: 3662 - RNA, 10 nt, Unknown
  source: /note="Description of Unknown: Exemplary gene or splice site sequence"
cagguaacgc

SEQ ID NO: 3663 - RNA, 10 nt, Unknown
  source: /note="Description of Unknown: Exemplary gene or splice site sequence"
cugguacacu

SEQ ID NO: 3664 - RNA, 10 nt, Unknown
  source: /note="Description of Unknown: Exemplary gene or splice site sequence"
cagguacuug

SEQ ID NO: 3665 - RNA, 10 nt, Unknown
  source: /note="Description of Unknown: Exemplary gene or splice site sequence"
cacguaagua

SEQ ID NO: 3666 - RNA, 10 nt, Unknown
  source: /note="Description of Unknown: Exemplary gene or splice site sequence"
guggugcggc

SEQ ID NO: 3667 - RNA, 10 nt, Unknown
  source: /note="Description of Unknown: Exemplary gene or splice site sequence"
gaggucaguu

SEQ ID NO: 3668 - RNA, 10 nt, Unknown
  source: /note="Description of Unknown: Exemplary gene or splice site sequence"
guuguaggua

SEQ ID NO: 3669 - RNA, 10 nt, Unknown
  source: /note="Description of Unknown: Exemplary gene or splice site sequence"
uggguacaag

SEQ ID NO: 3670 - RNA, 10 nt, Unknown
  source: /note="Description of Unknown: Exemplary gene or splice site sequence"
auggcaagua

SEQ ID NO: 3671 - RNA, 10 nt, Unknown
  source: /note="Description of Unknown: Exemplary gene or splice site sequence"
gcggugagag

SEQ ID NO: 3672 - RNA, 10 nt, Unknown
  source: /note="Description of Unknown: Exemplary gene or splice site sequence"
aaggugcuuc

SEQ ID NO: 3673 - RNA, 10 nt, Unknown
  source: /note="Description of Unknown: Exemplary gene or splice site sequence"
uagguacauc

SEQ ID NO: 3674 - RNA, 10 nt, Unknown
  source: /note="Description of Unknown: Exemplary gene or splice site sequence"
acugugguaa

SEQ ID NO: 3675 - RNA, 10 nt, Unknown
  source: /note="Description of Unknown: Exemplary gene or splice site sequence"
gagguaugca

SEQ ID NO: 3676 - RNA, 10 nt, Unknown
  source: /note="Description of Unknown: Exemplary gene or splice site sequence"
aggguaguuc

SEQ ID NO: 3677 - RNA, 10 nt, Unknown
  source: /note="Description of Unknown: Exemplary gene or splice site sequence"
cagguuggga

SEQ ID NO: 3678 - RNA, 10 nt, Unknown
  source: /note="Description of Unknown: Exemplary gene or splice site sequence"
cagguggaua

SEQ ID NO: 3679 - RNA, 10 nt, Unknown
  source: /note="Description of Unknown: Exemplary gene or splice site sequence"
gagguaggau

SEQ ID NO: 3680 - RNA, 10 nt, Unknown
  source: /note="Description of Unknown: Exemplary gene or splice site sequence"
gggguuugug

SEQ ID NO: 3681 - RNA, 10 nt, Unknown
  source: /note="Description of Unknown: Exemplary gene or splice site sequence"
uagguaauug

SEQ ID NO: 3682 - RNA, 10 nt, Unknown
  source: /note="Description of Unknown: Exemplary gene or splice site sequence"
acgguaagaa

SEQ ID NO: 3683 - RNA, 10 nt, Unknown
  source: /note="Description of Unknown: Exemplary gene or splice site sequence"
ucgguacagg

SEQ ID NO: 3684 - RNA, 10 nt, Unknown
  source: /note="Description of Unknown: Exemplary gene or splice site sequence"
caaguaagcg

SEQ ID NO: 3685 - RNA, 10 nt, Unknown
  source: /note="Description of Unknown: Exemplary gene or splice site sequence"
aagguccgcg

SEQ ID NO: 3686 - RNA, 10 nt, Unknown
  source: /note="Description of Unknown: Exemplary gene or splice site sequence"
caggugaaug

SEQ ID NO: 3687 - RNA, 10 nt, Unknown
  source: /note="Description of Unknown: Exemplary gene or splice site sequence"
ucuguauguc

SEQ ID NO: 3688 - RNA, 10 nt, Unknown
  source: /note="Description of Unknown: Exemplary gene or splice site sequence"
ucgguuagua

SEQ ID NO: 3689 - RNA, 10 nt, Unknown
  source: /note="Description of Unknown: Exemplary gene or splice site sequence"
gauguaugca

SEQ ID NO: 3690 - RNA, 10 nt, Unknown
  source: /note="Description of Unknown: Exemplary gene or splice site sequence"
gagguuggug

SEQ ID NO: 3691 - RNA, 10 nt, Unknown
  source: /note="Description of Unknown: Exemplary gene or splice site sequence"
ugggucaguc

SEQ ID NO: 3692 - RNA, 10 nt, Unknown
  source: /note="Description of Unknown: Exemplary gene or splice site sequence"
cagguugcuu

SEQ ID NO: 3693 - RNA, 10 nt, Unknown
  source: /note="Description of Unknown: Exemplary gene or splice site sequence"
aggguagagu

SEQ ID NO: 3694 - RNA, 10 nt, Unknown
  source: /note="Description of Unknown: Exemplary gene or splice site sequence"
cgcguaugua

SEQ ID NO: 3695 - RNA, 10 nt, Unknown
  source: /note="Description of Unknown: Exemplary gene or splice site sequence"
gagguauuaa

SEQ ID NO: 3696 - RNA, 10 nt, Unknown
  source: /note="Description of Unknown: Exemplary gene or splice site sequence"
cagguaaacu

SEQ ID NO: 3697 - RNA, 10 nt, Unknown
  source: /note="Description of Unknown: Exemplary gene or splice site sequence"
ggggucuggc

SEQ ID NO: 3698 - RNA, 10 nt, Unknown
  source: /note="Description of Unknown: Exemplary gene or splice site sequence"
gcuguggggu

SEQ ID NO: 3699 - RNA, 10 nt, Unknown
  source: /note="Description of Unknown: Exemplary gene or splice site sequence"
uugguaaguc

SEQ ID NO: 3700 - RNA, 10 nt, Unknown
  source: /note="Description of Unknown: Exemplary gene or splice site sequence"
aagguagaag

SEQ ID NO: 3701 - RNA, 10 nt, Unknown
  source: /note="Description of Unknown: Exemplary gene or splice site sequence"
auggugagga

SEQ ID NO: 3702 - RNA, 10 nt, Unknown
  source: /note="Description of Unknown: Exemplary gene or splice site sequence"
ccgguacagc

SEQ ID NO: 3703 - RNA, 10 nt, Unknown
  source: /note="Description of Unknown: Exemplary gene or splice site sequence"
gcggugcgga

SEQ ID NO: 3704 - RNA, 10 nt, Unknown
  source: /note="Description of Unknown: Exemplary gene or splice site sequence"
aacguagguu

SEQ ID NO: 3705 - RNA, 10 nt, Unknown
  source: /note="Description of Unknown: Exemplary gene or splice site sequence"
uugguacuau

SEQ ID NO: 3706 - RNA, 10 nt, Unknown
  source: /note="Description of Unknown: Exemplary gene or splice site sequence"
caggcauggg

SEQ ID NO: 3707 - RNA, 10 nt, Unknown
  source: /note="Description of Unknown: Exemplary gene or splice site sequence"
caggugggcg

SEQ ID NO: 3708 - RNA, 10 nt, Unknown
  source: /note="Description of Unknown: Exemplary gene or splice site sequence"
cacgugagga

SEQ ID NO: 3709 - RNA, 10 nt, Unknown
  source: /note="Description of Unknown: Exemplary gene or splice site sequence"
ugggcauucu

SEQ ID NO: 3710 - RNA, 10 nt, Unknown
  source: /note="Description of Unknown: Exemplary gene or splice site sequence"
agaguacgua

SEQ ID NO: 3711 - RNA, 10 nt, Unknown
  source: /note="Description of Unknown: Exemplary gene or splice site sequence"
aagguauuca

SEQ ID NO: 3712 - RNA, 10 nt, Unknown
  source: /note="Description of Unknown: Exemplary gene or splice site sequence"
gaggucuaca

SEQ ID NO: 3713 - RNA, 10 nt, Unknown
  source: /note="Description of Unknown: Exemplary gene or splice site sequence"
guuguagguc

SEQ ID NO: 3714 - RNA, 10 nt, Unknown
  source: /note="Description of Unknown: Exemplary gene or splice site sequence"
cagguacucg

SEQ ID NO: 3715 - RNA, 10 nt, Unknown
  source: /note="Description of Unknown: Exemplary gene or splice site sequence"
gucguauguu

SEQ ID NO: 3716 - RNA, 10 nt, Unknown
  source: /note="Description of Unknown: Exemplary gene or splice site sequence"
aguguuggua

SEQ ID NO: 3717 - RNA, 10 nt, Unknown
  source: /note="Description of Unknown: Exemplary gene or splice site sequence"
aagguagauu

SEQ ID NO: 3718 - RNA, 10 nt, Unknown
  source: /note="Description of Unknown: Exemplary gene or splice site sequence"
gaggccccag

SEQ ID NO: 3719 - RNA, 10 nt, Unknown
  source: /note="Description of Unknown: Exemplary gene or splice site sequence"
auggucaguu

SEQ ID NO: 3720 - RNA, 10 nt, Unknown
  source: /note="Description of Unknown: Exemplary gene or splice site sequence"
ucuguaagga

SEQ ID NO: 3721 - RNA, 10 nt, Unknown
  source: /note="Description of Unknown: Exemplary gene or splice site sequence"
caggucgggc

SEQ ID NO: 3722 - RNA, 10 nt, Unknown
  source: /note="Description of Unknown: Exemplary gene or splice site sequence"
cugguacuuc

SEQ ID NO: 3723 - RNA, 10 nt, Unknown
  source: /note="Description of Unknown: Exemplary gene or splice site sequence"
uggguccgua

SEQ ID NO: 3724 - RNA, 10 nt, Unknown
  source: /note="Description of Unknown: Exemplary gene or splice site sequence"
gagguugugc

SEQ ID NO: 3725 - RNA, 10 nt, Unknown
  source: /note="Description of Unknown: Exemplary gene or splice site sequence"
aaaguauggc

SEQ ID NO: 3726 - RNA, 10 nt, Unknown
  source: /note="Description of Unknown: Exemplary gene or splice site sequence"
cugguacgga

SEQ ID NO: 3727 - RNA, 10 nt, Unknown
  source: /note="Description of Unknown: Exemplary gene or splice site sequence"
caagugaccu

SEQ ID NO: 3728 - RNA, 10 nt, Unknown
  source: /note="Description of Unknown: Exemplary gene or splice site sequence"
aaggucugca

SEQ ID NO: 3729 - RNA, 10 nt, Unknown
  source: /note="Description of Unknown: Exemplary gene or splice site sequence"
aaggugaccu

SEQ ID NO: 3730 - RNA, 10 nt, Unknown
  source: /note="Description of Unknown: Exemplary gene or splice site sequence"
caggcagguc

SEQ ID NO: 3731 - RNA, 10 nt, Unknown
  source: /note="Description of Unknown: Exemplary gene or splice site sequence"
ucagcaguga

SEQ ID NO: 3732 - RNA, 10 nt, Unknown
  source: /note="Description of Unknown: Exemplary gene or splice site sequence"
aagguaccac

SEQ ID NO: 3733 - RNA, 10 nt, Unknown
  source: /note="Description of Unknown: Exemplary gene or splice site sequence"
uaaguaggug

SEQ ID NO: 3734 - RNA, 10 nt, Unknown
  source: /note="Description of Unknown: Exemplary gene or splice site sequence"
caggugucgg

SEQ ID NO: 3735 - RNA, 10 nt, Unknown
  source: /note="Description of Unknown: Exemplary gene or splice site sequence"
cagguggcua

SEQ ID NO: 3736 - RNA, 10 nt, Unknown
  source: /note="Description of Unknown: Exemplary gene or splice site sequence"
gagguugcca

SEQ ID NO: 3737 - RNA, 10 nt, Unknown
  source: /note="Description of Unknown: Exemplary gene or splice site sequence"
caggccgugg

SEQ ID NO: 3738 - RNA, 10 nt, Unknown
  source: /note="Description of Unknown: Exemplary gene or splice site sequence"
uugguauaug

SEQ ID NO: 3739 - RNA, 10 nt, Unknown
  source: /note="Description of Unknown: Exemplary gene or splice site sequence"
gagguugagu

SEQ ID NO: 3740 - RNA, 10 nt, Unknown
  source: /note="Description of Unknown: Exemplary gene or splice site sequence"
gagguagguc

SEQ ID NO: 3741 - RNA, 10 nt, Unknown
  source: /note="Description of Unknown: Exemplary gene or splice site sequence"
uagguccuuc

SEQ ID NO: 3742 - RNA, 10 nt, Unknown
  source: /note="Description of Unknown: Exemplary gene or splice site sequence"
gaggcaaguc

SEQ ID NO: 3743 - RNA, 10 nt, Unknown
  source: /note="Description of Unknown: Exemplary gene or splice site sequence"
gagguaacau

SEQ ID NO: 3744 - RNA, 10 nt, Unknown
  source: /note="Description of Unknown: Exemplary gene or splice site sequence"
ucgguugguu

SEQ ID NO: 3745 - RNA, 10 nt, Unknown
  source: /note="Description of Unknown: Exemplary gene or splice site sequence"
caggugaacc

SEQ ID NO: 3746 - RNA, 10 nt, Unknown
  source: /note="Description of Unknown: Exemplary gene or splice site sequence"
caggucuuuu

SEQ ID NO: 3747 - RNA, 10 nt, Unknown
  source: /note="Description of Unknown: Exemplary gene or splice site sequence"
caggcauggc

SEQ ID NO: 3748 - RNA, 10 nt, Unknown
  source: /note="Description of Unknown: Exemplary gene or splice site sequence"
uugguagguu

SEQ ID NO: 3749 - RNA, 10 nt, Unknown
  source: /note="Description of Unknown: Exemplary gene or splice site sequence"
uaugugagca

SEQ ID NO: 3750 - RNA, 10 nt, Unknown
  source: /note="Description of Unknown: Exemplary gene or splice site sequence"
aauguaauaa

SEQ ID NO: 3751 - RNA, 10 nt, Unknown
  source: /note="Description of Unknown: Exemplary gene or splice site sequence"
aaaguaaggc

SEQ ID NO: 3752 - RNA, 10 nt, Unknown
  source: /note="Description of Unknown: Exemplary gene or splice site sequence"
gagguaaguu

SEQ ID NO: 3753 - RNA, 10 nt, Unknown
  source: /note="Description of Unknown: Exemplary gene or splice site sequence"
aagguagccg

SEQ ID NO: 3754 - RNA, 10 nt, Unknown
  source: /note="Description of Unknown: Exemplary gene or splice site sequence"
cagguggugc

SEQ ID NO: 3755 - RNA, 10 nt, Unknown
  source: /note="Description of Unknown: Exemplary gene or splice site sequence"
ugagucaguu

SEQ ID NO: 3756 - RNA, 10 nt, Unknown
  source: /note="Description of Unknown: Exemplary gene or splice site sequence"
cugguaggcc

SEQ ID NO: 3757 - RNA, 10 nt, Unknown
  source: /note="Description of Unknown: Exemplary gene or splice site sequence"
caaguaagga

SEQ ID NO: 3758 - RNA, 10 nt, Unknown
  source: /note="Description of Unknown: Exemplary gene or splice site sequence"
cggguaaggc

SEQ ID NO: 3759 - RNA, 10 nt, Unknown
  source: /note="Description of Unknown: Exemplary gene or splice site sequence"
aaggcgagga

SEQ ID NO: 3760 - RNA, 10 nt, Unknown
  source: /note="Description of Unknown: Exemplary gene or splice site sequence"
ccgguaauua

SEQ ID NO: 3761 - RNA, 10 nt, Unknown
  source: /note="Description of Unknown: Exemplary gene or splice site sequence"
aaggugguca

SEQ ID NO: 3762 - RNA, 10 nt, Unknown
  source: /note="Description of Unknown: Exemplary gene or splice site sequence"
aucguaagua

SEQ ID NO: 3763 - RNA, 10 nt, Unknown
  source: /note="Description of Unknown: Exemplary gene or splice site sequence"
ccgguacaua

SEQ ID NO: 3764 - RNA, 10 nt, Unknown
  source: /note="Description of Unknown: Exemplary gene or splice site sequence"
gcggugagug

SEQ ID NO: 3765 - RNA, 10 nt, Unknown
  source: /note="Description of Unknown: Exemplary gene or splice site sequence"
cuggugugga

SEQ ID NO: 3766 - RNA, 10 nt, Unknown
  source: /note="Description of Unknown: Exemplary gene or splice site sequence"
gagguaauuc

SEQ ID NO: 3767 - RNA, 10 nt, Unknown
  source: /note="Description of Unknown: Exemplary gene or splice site sequence"
caaguacgua

SEQ ID NO: 3768 - RNA, 10 nt, Unknown
  source: /note="Description of Unknown: Exemplary gene or splice site sequence"
uagguuagga

SEQ ID NO: 3769 - RNA, 10 nt, Unknown
  source: /note="Description of Unknown: Exemplary gene or splice site sequence"
auggcaggug

SEQ ID NO: 3770 - RNA, 10 nt, Unknown
  source: /note="Description of Unknown: Exemplary gene or splice site sequence"
uaggcaagua

SEQ ID NO: 3771 - RNA, 10 nt, Unknown
  source: /note="Description of Unknown: Exemplary gene or splice site sequence"
gcagcccgca

SEQ ID NO: 3772 - RNA, 10 nt, Unknown
  source: /note="Description of Unknown: Exemplary gene or splice site sequence"
acgguaaacu

SEQ ID NO: 3773 - RNA, 10 nt, Unknown
  source: /note="Description of Unknown: Exemplary gene or splice site sequence"
guaguagucu

SEQ ID NO: 3774 - RNA, 10 nt, Unknown
  source: /note="Description of Unknown: Exemplary gene or splice site sequence"
guggcugaaa

SEQ ID NO: 3775 - RNA, 10 nt, Unknown
  source: /note="Description of Unknown: Exemplary gene or splice site sequence"
aaagugauug

SEQ ID NO: 3776 - RNA, 10 nt, Unknown
  source: /note="Description of Unknown: Exemplary gene or splice site sequence"
uaggucugga

SEQ ID NO: 3777 - RNA, 10 nt, Unknown
  source: /note="Description of Unknown: Exemplary gene or splice site sequence"
gagguguuuc

SEQ ID NO: 3778 - RNA, 10 nt, Unknown
  source: /note="Description of Unknown: Exemplary gene or splice site sequence"
cauguacauc

SEQ ID NO: 3779 - RNA, 10 nt, Unknown
  source: /note="Description of Unknown: Exemplary gene or splice site sequence"
aagguuugaa

SEQ ID NO: 3780 - RNA, 10 nt, Unknown
  source: /note="Description of Unknown: Exemplary gene or splice site sequence"
ccagcaagug

SEQ ID NO: 3781 - RNA, 10 nt, Unknown
  source: /note="Description of Unknown: Exemplary gene or splice site sequence"
uagguaauaa

SEQ ID NO: 3782 - RNA, 10 nt, Unknown
  source: /note="Description of Unknown: Exemplary gene or splice site sequence"
caggucgugg

SEQ ID NO: 3783 - RNA, 10 nt, Unknown
  source: /note="Description of Unknown: Exemplary gene or splice site sequence"
gaaguaugcc

SEQ ID NO: 3784 - RNA, 10 nt, Unknown
  source: /note="Description of Unknown: Exemplary gene or splice site sequence"
ucggugcccu

SEQ ID NO: 3785 - RNA, 10 nt, Unknown
  source: /note="Description of Unknown: Exemplary gene or splice site sequence"
gaggucaguc

SEQ ID NO: 3786 - RNA, 10 nt, Unknown
  source: /note="Description of Unknown: Exemplary gene or splice site sequence"
uuugucugua

SEQ ID NO: 3787 - RNA, 10 nt, Unknown
  source: /note="Description of Unknown: Exemplary gene or splice site sequence"
cagguagaua

SEQ ID NO: 3788 - RNA, 10 nt, Unknown
  source: /note="Description of Unknown: Exemplary gene or splice site sequence"
uggguaucag

SEQ ID NO: 3789 - RNA, 10 nt, Unknown
  source: /note="Description of Unknown: Exemplary gene or splice site sequence"
auggugagau

SEQ ID NO: 3790 - RNA, 10 nt, Unknown
  source: /note="Description of Unknown: Exemplary gene or splice site sequence"
cagguaacac

SEQ ID NO: 3791 - RNA, 10 nt, Unknown
  source: /note="Description of Unknown: Exemplary gene or splice site sequence"
ccgguauccu

SEQ ID NO: 3792 - RNA, 10 nt, Unknown
  source: /note="Description of Unknown: Exemplary gene or splice site sequence"
ucaguacauc

SEQ ID NO: 3793 - RNA, 10 nt, Unknown
  source: /note="Description of Unknown: Exemplary gene or splice site sequence"
uugguaagac

SEQ ID NO: 3794 - RNA, 10 nt, Unknown
  source: /note="Description of Unknown: Exemplary gene or splice site sequence"
ccgguuaguc

SEQ ID NO: 3795 - RNA, 10 nt, Unknown
  source: /note="Description of Unknown: Exemplary gene or splice site sequence"
acaguauguc

SEQ ID NO: 3796 - RNA, 10 nt, Unknown
  source: /note="Description of Unknown: Exemplary gene or splice site sequence"
cagguauuaa

SEQ ID NO: 3797 - RNA, 10 nt, Unknown
  source: /note="Description of Unknown: Exemplary gene or splice site sequence"
cagguggauc

SEQ ID NO: 3798 - RNA, 10 nt, Unknown
  source: /note="Description of Unknown: Exemplary gene or splice site sequence"
agagugcgua

SEQ ID NO: 3799 - RNA, 10 nt, Unknown
  source: /note="Description of Unknown: Exemplary gene or splice site sequence"
aaggugaccg

SEQ ID NO: 3800 - RNA, 10 nt, Unknown
  source: /note="Description of Unknown: Exemplary gene or splice site sequence"
acuguaugua

SEQ ID NO: 3801 - RNA, 10 nt, Unknown
  source: /note="Description of Unknown: Exemplary gene or splice site sequence"
uaggucaauu

SEQ ID NO: 3802 - RNA, 10 nt, Unknown
  source: /note="Description of Unknown: Exemplary gene or splice site sequence"
aguguguaag

SEQ ID NO: 3803 - RNA, 10 nt, Unknown
  source: /note="Description of Unknown: Exemplary gene or splice site sequence"
cggguaccuu

SEQ ID NO: 3804 - RNA, 10 nt, Unknown
  source: /note="Description of Unknown: Exemplary gene or splice site sequence"
cuagugaguu

SEQ ID NO: 3805 - RNA, 10 nt, Unknown
  source: /note="Description of Unknown: Exemplary gene or splice site sequence"
cagguacaac

SEQ ID NO: 3806 - RNA, 10 nt, Unknown
  source: /note="Description of Unknown: Exemplary gene or splice site sequence"
cauguacggc

SEQ ID NO: 3807 - RNA, 10 nt, Unknown
  source: /note="Description of Unknown: Exemplary gene or splice site sequence"
auggugugag

SEQ ID NO: 3808 - RNA, 10 nt, Unknown
  source: /note="Description of Unknown: Exemplary gene or splice site sequence"
aggguggaag

SEQ ID NO: 3809 - RNA, 10 nt, Unknown
  source: /note="Description of Unknown: Exemplary gene or splice site sequence"
caggugcgag

SEQ ID NO: 3810 - RNA, 10 nt, Unknown
  source: /note="Description of Unknown: Exemplary gene or splice site sequence"
uaggugcucc

SEQ ID NO: 3811 - RNA, 10 nt, Unknown
  source: /note="Description of Unknown: Exemplary gene or splice site sequence"
cagguuuuua

SEQ ID NO: 3812 - RNA, 10 nt, Unknown
  source: /note="Description of Unknown: Exemplary gene or splice site sequence"
aacgugaggu

SEQ ID NO: 3813 - RNA, 10 nt, Unknown
  source: /note="Description of Unknown: Exemplary gene or splice site sequence"
cggguaagag

SEQ ID NO: 3814 - RNA, 10 nt, Unknown
  source: /note="Description of Unknown: Exemplary gene or splice site sequence"
uuugucggua

SEQ ID NO: 3815 - RNA, 10 nt, Unknown
  source: /note="Description of Unknown: Exemplary gene or splice site sequence"
uagguuaagu

SEQ ID NO: 3816 - RNA, 10 nt, Unknown
  source: /note="Description of Unknown: Exemplary gene or splice site sequence"
ucgguaaaua

SEQ ID NO: 3817 - RNA, 10 nt, Unknown
  source: /note="Description of Unknown: Exemplary gene or splice site sequence"
ccugugagua

SEQ ID NO: 3818 - RNA, 10 nt, Unknown
  source: /note="Description of Unknown: Exemplary gene or splice site sequence"
cagguuauau

SEQ ID NO: 3819 - RNA, 10 nt, Unknown
  source: /note="Description of Unknown: Exemplary gene or splice site sequence"
cuggugaaca

SEQ ID NO: 3820 - RNA, 10 nt, Unknown
  source: /note="Description of Unknown: Exemplary gene or splice site sequence"
uuugugagua

SEQ ID NO: 3821 - RNA, 10 nt, Unknown
  source: /note="Description of Unknown: Exemplary gene or splice site sequence"
cuuguacgcc

SEQ ID NO: 3822 - RNA, 10 nt, Unknown
  source: /note="Description of Unknown: Exemplary gene or splice site sequence"
ugagcccugc

SEQ ID NO: 3823 - RNA, 10 nt, Unknown
  source: /note="Description of Unknown: Exemplary gene or splice site sequence"
uguguaugua

SEQ ID NO: 3824 - RNA, 10 nt, Unknown
  source: /note="Description of Unknown: Exemplary gene or splice site sequence"
aagguagagg

SEQ ID NO: 3825 - RNA, 10 nt, Unknown
  source: /note="Description of Unknown: Exemplary gene or splice site sequence"
aaggcauggu

SEQ ID NO: 3826 - RNA, 10 nt, Unknown
  source: /note="Description of Unknown: Exemplary gene or splice site sequence"
acuguaauug

SEQ ID NO: 3827 - RNA, 10 nt, Unknown
  source: /note="Description of Unknown: Exemplary gene or splice site sequence"
ucgguaccga

SEQ ID NO: 3828 - RNA, 10 nt, Unknown
  source: /note="Description of Unknown: Exemplary gene or splice site sequence"
cuggugagag

SEQ ID NO: 3829 - RNA, 10 nt, Unknown
  source: /note="Description of Unknown: Exemplary gene or splice site sequence"
augguaccac

SEQ ID NO: 3830 - RNA, 10 nt, Unknown
  source: /note="Description of Unknown: Exemplary gene or splice site sequence"
uaaguuaguu

SEQ ID NO: 3831 - RNA, 10 nt, Unknown
  source: /note="Description of Unknown: Exemplary gene or splice site sequence"
agagugaggc

SEQ ID NO: 3832 - RNA, 10 nt, Unknown
  source: /note="Description of Unknown: Exemplary gene or splice site sequence"
cgagucagua

SEQ ID NO: 3833 - RNA, 10 nt, Unknown
  source: /note="Description of Unknown: Exemplary gene or splice site sequence"
gagguggugg

SEQ ID NO: 3834 - RNA, 10 nt, Unknown
  source: /note="Description of Unknown: Exemplary gene or splice site sequence"
acgguauugg

SEQ ID NO: 3835 - RNA, 10 nt, Unknown
  source: /note="Description of Unknown: Exemplary gene or splice site sequence"
gcugcgagua

SEQ ID NO: 3836 - RNA, 10 nt, Unknown
  source: /note="Description of Unknown: Exemplary gene or splice site sequence"
gggguuugau

SEQ ID NO: 3837 - RNA, 10 nt, Unknown
  source: /note="Description of Unknown: Exemplary gene or splice site sequence"
cuggcaggug

SEQ ID NO: 3838 - RNA, 10 nt, Unknown
  source: /note="Description of Unknown: Exemplary gene or splice site sequence"
gcugucuguu

SEQ ID NO: 3839 - RNA, 10 nt, Unknown
  source: /note="Description of Unknown: Exemplary gene or splice site sequence"
gagguaacgg

SEQ ID NO: 3840 - RNA, 10 nt, Unknown
  source: /note="Description of Unknown: Exemplary gene or splice site sequence"
cugguauucu

SEQ ID NO: 3841 - RNA, 10 nt, Unknown
  source: /note="Description of Unknown: Exemplary gene or splice site sequence"
gugguaaacu

SEQ ID NO: 3842 - RNA, 10 nt, Unknown
  source: /note="Description of Unknown: Exemplary gene or splice site sequence"
gaggcgagcg

SEQ ID NO: 3843 - RNA, 10 nt, Unknown
  source: /note="Description of Unknown: Exemplary gene or splice site sequence"
uguguaagcg

SEQ ID NO: 3844 - RNA, 10 nt, Unknown
  source: /note="Description of Unknown: Exemplary gene or splice site sequence"
acaguaugug

SEQ ID NO: 3845 - RNA, 10 nt, Unknown
  source: /note="Description of Unknown: Exemplary gene or splice site sequence"
ccggugggga

SEQ ID NO: 3846 - RNA, 10 nt, Unknown
  source: /note="Description of Unknown: Exemplary gene or splice site sequence"
gaggucagug

SEQ ID NO: 3847 - RNA, 10 nt, Unknown
  source: /note="Description of Unknown: Exemplary gene or splice site sequence"
aggguaaggu

SEQ ID NO: 3848 - RNA, 10 nt, Unknown
  source: /note="Description of Unknown: Exemplary gene or splice site sequence"
gguguaaggu

SEQ ID NO: 3849 - RNA, 10 nt, Unknown
  source: /note="Description of Unknown: Exemplary gene or splice site sequence"
cagguauucc

SEQ ID NO: 3850 - RNA, 10 nt, Unknown
  source: /note="Description of Unknown: Exemplary gene or splice site sequence"
cugguauaaa

SEQ ID NO: 3851 - RNA, 10 nt, Unknown
  source: /note="Description of Unknown: Exemplary gene or splice site sequence"
ccggucugug

SEQ ID NO: 3852 - RNA, 10 nt, Unknown
  source: /note="Description of Unknown: Exemplary gene or splice site sequence"
caaguccacc

SEQ ID NO: 3853 - RNA, 10 nt, Unknown
  source: /note="Description of Unknown: Exemplary gene or splice site sequence"
caaguuggug

SEQ ID NO: 3854 - RNA, 10 nt, Unknown
  source: /note="Description of Unknown: Exemplary gene or splice site sequence"
cagguaaaau

SEQ ID NO: 3855 - RNA, 10 nt, Unknown
  source: /note="Description of Unknown: Exemplary gene or splice site sequence"
acgguaagga

SEQ ID NO: 3856 - RNA, 10 nt, Unknown
  source: /note="Description of Unknown: Exemplary gene or splice site sequence"
uggguaauaa

SEQ ID NO: 3857 - RNA, 10 nt, Unknown
  source: /note="Description of Unknown: Exemplary gene or splice site sequence"
ccgguagguu

SEQ ID NO: 3858 - RNA, 10 nt, Unknown
  source: /note="Description of Unknown: Exemplary gene or splice site sequence"
agaguaugga

SEQ ID NO: 3859 - RNA, 10 nt, Unknown
  source: /note="Description of Unknown: Exemplary gene or splice site sequence"
cucgugaguc

SEQ ID NO: 3860 - RNA, 10 nt, Unknown
  source: /note="Description of Unknown: Exemplary gene or splice site sequence"
aaagccggug

SEQ ID NO: 3861 - RNA, 10 nt, Unknown
  source: /note="Description of Unknown: Exemplary gene or splice site sequence"
ccugugugag

SEQ ID NO: 3862 - RNA, 10 nt, Unknown
  source: /note="Description of Unknown: Exemplary gene or splice site sequence"
ccgguaaaug

SEQ ID NO: 3863 - RNA, 10 nt, Unknown
  source: /note="Description of Unknown: Exemplary gene or splice site sequence"
caggugaagc

SEQ ID NO: 3864 - RNA, 10 nt, Unknown
  source: /note="Description of Unknown: Exemplary gene or splice site sequence"
ucgguagguc

SEQ ID NO: 3865 - RNA, 10 nt, Unknown
  source: /note="Description of Unknown: Exemplary gene or splice site sequence"
cgggugaggc

SEQ ID NO: 3866 - RNA, 10 nt, Unknown
  source: /note="Description of Unknown: Exemplary gene or splice site sequence"
cauguccacc

SEQ ID NO: 3867 - RNA, 10 nt, Unknown
  source: /note="Description of Unknown: Exemplary gene or splice site sequence"
aaggugaccc

SEQ ID NO: 3868 - RNA, 10 nt, Unknown
  source: /note="Description of Unknown: Exemplary gene or splice site sequence"
cggguuagua

SEQ ID NO: 3869 - RNA, 10 nt, Unknown
  source: /note="Description of Unknown: Exemplary gene or splice site sequence"
gcgguaguaa

SEQ ID NO: 3870 - RNA, 10 nt, Unknown
  source: /note="Description of Unknown: Exemplary gene or splice site sequence"
gcuguaggua

SEQ ID NO: 3871 - RNA, 10 nt, Unknown
  source: /note="Description of Unknown: Exemplary gene or splice site sequence"
ccuguugagu

SEQ ID NO: 3872 - RNA, 10 nt, Unknown
  source: /note="Description of Unknown: Exemplary gene or splice site sequence"
aggguaagac

SEQ ID NO: 3873 - RNA, 10 nt, Unknown
  source: /note="Description of Unknown: Exemplary gene or splice site sequence"
uuuguaggca

SEQ ID NO: 3874 - RNA, 10 nt, Unknown
  source: /note="Description of Unknown: Exemplary gene or splice site sequence"
agggugagau

SEQ ID NO: 3875 - RNA, 10 nt, Unknown
  source: /note="Description of Unknown: Exemplary gene or splice site sequence"
auaguaaaga

SEQ ID NO: 3876 - RNA, 10 nt, Unknown
  source: /note="Description of Unknown: Exemplary gene or splice site sequence"
aaggugcagg

SEQ ID NO: 3877 - RNA, 10 nt, Unknown
  source: /note="Description of Unknown: Exemplary gene or splice site sequence"
gaggugauuu

SEQ ID NO: 3878 - RNA, 10 nt, Unknown
  source: /note="Description of Unknown: Exemplary gene or splice site sequence"
cagguuggcu

SEQ ID NO: 3879 - RNA, 10 nt, Unknown
  source: /note="Description of Unknown: Exemplary gene or splice site sequence"
cggguauggg

SEQ ID NO: 3880 - RNA, 10 nt, Unknown
  source: /note="Description of Unknown: Exemplary gene or splice site sequence"
augguccauc

SEQ ID NO: 3881 - RNA, 10 nt, Unknown
  source: /note="Description of Unknown: Exemplary gene or splice site sequence"
ccgguuggug

SEQ ID NO: 3882 - RNA, 10 nt, Unknown
  source: /note="Description of Unknown: Exemplary gene or splice site sequence"
ggaguaaguc

SEQ ID NO: 3883 - RNA, 10 nt, Unknown
  source: /note="Description of Unknown: Exemplary gene or splice site sequence"
uaugucuuug

SEQ ID NO: 3884 - RNA, 10 nt, Unknown
  source: /note="Description of Unknown: Exemplary gene or splice site sequence"
acgguacuuc

SEQ ID NO: 3885 - RNA, 10 nt, Unknown
  source: /note="Description of Unknown: Exemplary gene or splice site sequence"
aaggcacgcg

SEQ ID NO: 3886 - RNA, 10 nt, Unknown
  source: /note="Description of Unknown: Exemplary gene or splice site sequence"
cuugugggua

SEQ ID NO: 3887 - RNA, 10 nt, Unknown
  source: /note="Description of Unknown: Exemplary gene or splice site sequence"
gagguggaga

SEQ ID NO: 3888 - RNA, 10 nt, Unknown
  source: /note="Description of Unknown: Exemplary gene or splice site sequence"
gugguggcug

SEQ ID NO: 3889 - RNA, 10 nt, Unknown
  source: /note="Description of Unknown: Exemplary gene or splice site sequence"
aacgugagua

SEQ ID NO: 3890 - RNA, 10 nt, Unknown
  source: /note="Description of Unknown: Exemplary gene or splice site sequence"
gaagcuguaa

SEQ ID NO: 3891 - RNA, 10 nt, Unknown
  source: /note="Description of Unknown: Exemplary gene or splice site sequence"
cggguaucuu

SEQ ID NO: 3892 - RNA, 10 nt, Unknown
  source: /note="Description of Unknown: Exemplary gene or splice site sequence"
aauguacgca

SEQ ID NO: 3893 - RNA, 10 nt, Unknown
  source: /note="Description of Unknown: Exemplary gene or splice site sequence"
ccggugggua

SEQ ID NO: 3894 - RNA, 10 nt, Unknown
  source: /note="Description of Unknown: Exemplary gene or splice site sequence"
ugggugaggu

SEQ ID NO: 3895 - RNA, 10 nt, Unknown
  source: /note="Description of Unknown: Exemplary gene or splice site sequence"
ccugugaaua

SEQ ID NO: 3896 - RNA, 10 nt, Unknown
  source: /note="Description of Unknown: Exemplary gene or splice site sequence"
gcugugugug

SEQ ID NO: 3897 - RNA, 10 nt, Unknown
  source: /note="Description of Unknown: Exemplary gene or splice site sequence"
aggguaaugu

SEQ ID NO: 3898 - RNA, 10 nt, Unknown
  source: /note="Description of Unknown: Exemplary gene or splice site sequence"
accguaaguu

SEQ ID NO: 3899 - RNA, 10 nt, Unknown
  source: /note="Description of Unknown: Exemplary gene or splice site sequence"
cguguaagua

SEQ ID NO: 3900 - RNA, 10 nt, Unknown
  source: /note="Description of Unknown: Exemplary gene or splice site sequence"
gggguaaguc

SEQ ID NO: 3901 - RNA, 10 nt, Unknown
  source: /note="Description of Unknown: Exemplary gene or splice site sequence"
aauguaugau

SEQ ID NO: 3902 - RNA, 10 nt, Unknown
  source: /note="Description of Unknown: Exemplary gene or splice site sequence"
aaugugauua

SEQ ID NO: 3903 - RNA, 10 nt, Unknown
  source: /note="Description of Unknown: Exemplary gene or splice site sequence"
cagguccguc

SEQ ID NO: 3904 - RNA, 10 nt, Unknown
  source: /note="Description of Unknown: Exemplary gene or splice site sequence"
gaaguauuga

SEQ ID NO: 3905 - RNA, 10 nt, Unknown
  source: /note="Description of Unknown: Exemplary gene or splice site sequence"
caggucgguu

SEQ ID NO: 3906 - RNA, 10 nt, Unknown
  source: /note="Description of Unknown: Exemplary gene or splice site sequence"
uacgugagua

SEQ ID NO: 3907 - RNA, 10 nt, Unknown
  source: /note="Description of Unknown: Exemplary gene or splice site sequence"
uugguaagca

SEQ ID NO: 3908 - RNA, 10 nt, Unknown
  source: /note="Description of Unknown: Exemplary gene or splice site sequence"
gcggugaguc

SEQ ID NO: 3909 - RNA, 10 nt, Unknown
  source: /note="Description of Unknown: Exemplary gene or splice site sequence"
gaaguaaggg

SEQ ID NO: 3910 - RNA, 10 nt, Unknown
  source: /note="Description of Unknown: Exemplary gene or splice site sequence"
cgcgugaguu

SEQ ID NO: 3911 - RNA, 10 nt, Unknown
  source: /note="Description of Unknown: Exemplary gene or splice site sequence"
cagguacccc

SEQ ID NO: 3912 - RNA, 10 nt, Unknown
  source: /note="Description of Unknown: Exemplary gene or splice site sequence"
ucuguaagac

SEQ ID NO: 3913 - RNA, 10 nt, Unknown
  source: /note="Description of Unknown: Exemplary gene or splice site sequence"
aauguaagac

SEQ ID NO: 3914 - RNA, 10 nt, Unknown
  source: /note="Description of Unknown: Exemplary gene or splice site sequence"
caggcaaggg

SEQ ID NO: 3915 - RNA, 10 nt, Unknown
  source: /note="Description of Unknown: Exemplary gene or splice site sequence"
aaaguuuguc

SEQ ID NO: 3916 - RNA, 10 nt, Unknown
  source: /note="Description of Unknown: Exemplary gene or splice site sequence"
ucgguaaguc

SEQ ID NO: 3917 - RNA, 10 nt, Unknown
  source: /note="Description of Unknown: Exemplary gene or splice site sequence"
cuugugagau

SEQ ID NO: 3918 - RNA, 10 nt, Unknown
  source: /note="Description of Unknown: Exemplary gene or splice site sequence"
agagugagcu

SEQ ID NO: 3919 - RNA, 10 nt, Unknown
  source: /note="Description of Unknown: Exemplary gene or splice site sequence"
uaagugggga

SEQ ID NO: 3920 - RNA, 10 nt, Unknown
  source: /note="Description of Unknown: Exemplary gene or splice site sequence"
aggguaauca

SEQ ID NO: 3921 - RNA, 10 nt, Unknown
  source: /note="Description of Unknown: Exemplary gene or splice site sequence"
aagguucagc

SEQ ID NO: 3922 - RNA, 10 nt, Unknown
  source: /note="Description of Unknown: Exemplary gene or splice site sequence"
ccgguauauu

SEQ ID NO: 3923 - RNA, 10 nt, Unknown
  source: /note="Description of Unknown: Exemplary gene or splice site sequence"
accguaugug

SEQ ID NO: 3924 - RNA, 10 nt, Unknown
  source: /note="Description of Unknown: Exemplary gene or splice site sequence"
cagguauagu

SEQ ID NO: 3925 - RNA, 10 nt, Unknown
  source: /note="Description of Unknown: Exemplary gene or splice site sequence"
cagguauuac

SEQ ID NO: 3926 - RNA, 10 nt, Unknown
  source: /note="Description of Unknown: Exemplary gene or splice site sequence"
cuggugaugg

SEQ ID NO: 3927 - RNA, 10 nt, Unknown
  source: /note="Description of Unknown: Exemplary gene or splice site sequence"
ccggugagca

SEQ ID NO: 3928 - RNA, 10 nt, Unknown
  source: /note="Description of Unknown: Exemplary gene or splice site sequence"
aagguacugg

SEQ ID NO: 3929 - RNA, 10 nt, Unknown
  source: /note="Description of Unknown: Exemplary gene or splice site sequence"
gcggucagga

SEQ ID NO: 3930 - RNA, 10 nt, Unknown
  source: /note="Description of Unknown: Exemplary gene or splice site sequence"
cuggucaggg

SEQ ID NO: 3931 - RNA, 10 nt, Unknown
  source: /note="Description of Unknown: Exemplary gene or splice site sequence"
aaaguacguu

SEQ ID NO: 3932 - RNA, 10 nt, Unknown
  source: /note="Description of Unknown: Exemplary gene or splice site sequence"
aggguaagcu

SEQ ID NO: 3933 - RNA, 10 nt, Unknown
  source: /note="Description of Unknown: Exemplary gene or splice site sequence"
ccggccacca

SEQ ID NO: 3934 - RNA, 10 nt, Unknown
  source: /note="Description of Unknown: Exemplary gene or splice site sequence"
caggcgagca

SEQ ID NO: 3935 - RNA, 10 nt, Unknown
  source: /note="Description of Unknown: Exemplary gene or splice site sequence"
agaguaggau

SEQ ID NO: 3936 - RNA, 10 nt, Unknown
  source: /note="Description of Unknown: Exemplary gene or splice site sequence"
cugguuucaa

SEQ ID NO: 3937 - RNA, 10 nt, Unknown
  source: /note="Description of Unknown: Exemplary gene or splice site sequence"
gagguaaacu

SEQ ID NO: 3938 - RNA, 10 nt, Unknown
  source: /note="Description of Unknown: Exemplary gene or splice site sequence"
uugguaaucu

SEQ ID NO: 3939 - RNA, 10 nt, Unknown
  source: /note="Description of Unknown: Exemplary gene or splice site sequence"
agggcagaau

SEQ ID NO: 3940 - RNA, 10 nt, Unknown
  source: /note="Description of Unknown: Exemplary gene or splice site sequence"
gcugcaggug

SEQ ID NO: 3941 - RNA, 10 nt, Unknown
  source: /note="Description of Unknown: Exemplary gene or splice site sequence"
gaagcacgug

SEQ ID NO: 3942 - RNA, 10 nt, Unknown
  source: /note="Description of Unknown: Exemplary gene or splice site sequence"
cauguaaaca

SEQ ID NO: 3943 - RNA, 10 nt, Unknown
  source: /note="Description of Unknown: Exemplary gene or splice site sequence"
aggguagcua

SEQ ID NO: 3944 - RNA, 10 nt, Unknown
  source: /note="Description of Unknown: Exemplary gene or splice site sequence"
ggaguaugua

SEQ ID NO: 3945 - RNA, 10 nt, Unknown
  source: /note="Description of Unknown: Exemplary gene or splice site sequence"
aaaguacgga

SEQ ID NO: 3946 - RNA, 10 nt, Unknown
  source: /note="Description of Unknown: Exemplary gene or splice site sequence"
gggguaauug

SEQ ID NO: 3947 - RNA, 10 nt, Unknown
  source: /note="Description of Unknown: Exemplary gene or splice site sequence"
gugguacgua

SEQ ID NO: 3948 - RNA, 10 nt, Unknown
  source: /note="Description of Unknown: Exemplary gene or splice site sequence"
aagguacagc

SEQ ID NO: 3949 - RNA, 10 nt, Unknown
  source: /note="Description of Unknown: Exemplary gene or splice site sequence"
gaggugaaga

SEQ ID NO: 3950 - RNA, 10 nt, Unknown
  source: /note="Description of Unknown: Exemplary gene or splice site sequence"
ugaguagguc

SEQ ID NO: 3951 - RNA, 10 nt, Unknown
  source: /note="Description of Unknown: Exemplary gene or splice site sequence"
ucaguaagac

SEQ ID NO: 3952 - RNA, 10 nt, Unknown
  source: /note="Description of Unknown: Exemplary gene or splice site sequence"
aaggcaaaac

SEQ ID NO: 3953 - RNA, 10 nt, Unknown
  source: /note="Description of Unknown: Exemplary gene or splice site sequence"
gaggcugugc

SEQ ID NO: 3954 - RNA, 10 nt, Unknown
  source: /note="Description of Unknown: Exemplary gene or splice site sequence"
agaguauggu

SEQ ID NO: 3955 - RNA, 10 nt, Unknown
  source: /note="Description of Unknown: Exemplary gene or splice site sequence"
gcugcugagc

SEQ ID NO: 3956 - RNA, 10 nt, Unknown
  source: /note="Description of Unknown: Exemplary gene or splice site sequence"
uaggucagaa

SEQ ID NO: 3957 - RNA, 10 nt, Unknown
  source: /note="Description of Unknown: Exemplary gene or splice site sequence"
ccgguaggug

SEQ ID NO: 3958 - RNA, 10 nt, Unknown
  source: /note="Description of Unknown: Exemplary gene or splice site sequence"
gcaguaugau

SEQ ID NO: 3959 - RNA, 10 nt, Unknown
  source: /note="Description of Unknown: Exemplary gene or splice site sequence"
cagguuucag

SEQ ID NO: 3960 - RNA, 10 nt, Unknown
  source: /note="Description of Unknown: Exemplary gene or splice site sequence"
gagguuugcc

SEQ ID NO: 3961 - RNA, 10 nt, Unknown
  source: /note="Description of Unknown: Exemplary gene or splice site sequence"
gggguggggg

SEQ ID NO: 3962 - RNA, 10 nt, Unknown
  source: /note="Description of Unknown: Exemplary gene or splice site sequence"
gcgguuagug

SEQ ID NO: 3963 - RNA, 10 nt, Unknown
  source: /note="Description of Unknown: Exemplary gene or splice site sequence"
augguaguug

SEQ ID NO: 3964 - RNA, 10 nt, Unknown
  source: /note="Description of Unknown: Exemplary gene or splice site sequence"
cauguaagac

SEQ ID NO: 3965 - RNA, 10 nt, Unknown
  source: /note="Description of Unknown: Exemplary gene or splice site sequence"
uucguaagga

SEQ ID NO: 3966 - RNA, 10 nt, Unknown
  source: /note="Description of Unknown: Exemplary gene or splice site sequence"
gaaguaugac

SEQ ID NO: 3967 - RNA, 10 nt, Unknown
  source: /note="Description of Unknown: Exemplary gene or splice site sequence"
cauguagggc

SEQ ID NO: 3968 - RNA, 10 nt, Unknown
  source: /note="Description of Unknown: Exemplary gene or splice site sequence"
accgucagga

SEQ ID NO: 3969 - RNA, 10 nt, Unknown
  source: /note="Description of Unknown: Exemplary gene or splice site sequence"
cguguucgau

SEQ ID NO: 3970 - RNA, 10 nt, Unknown
  source: /note="Description of Unknown: Exemplary gene or splice site sequence"
gaggcaggac

SEQ ID NO: 3971 - RNA, 10 nt, Unknown
  source: /note="Description of Unknown: Exemplary gene or splice site sequence"
ucgguauacu

SEQ ID NO: 3972 - RNA, 10 nt, Unknown
  source: /note="Description of Unknown: Exemplary gene or splice site sequence"
uagguugugc

SEQ ID NO: 3973 - RNA, 10 nt, Unknown
  source: /note="Description of Unknown: Exemplary gene or splice site sequence"
ccggugaguc

SEQ ID NO: 3974 - RNA, 10 nt, Unknown
  source: /note="Description of Unknown: Exemplary gene or splice site sequence"
guggugaggg

SEQ ID NO: 3975 - RNA, 10 nt, Unknown
  source: /note="Description of Unknown: Exemplary gene or splice site sequence"
ugggucagua

SEQ ID NO: 3976 - RNA, 10 nt, Unknown
  source: /note="Description of Unknown: Exemplary gene or splice site sequence"
ccuguuggua

SEQ ID NO: 3977 - RNA, 10 nt, Unknown
  source: /note="Description of Unknown: Exemplary gene or splice site sequence"
gagguaucca

SEQ ID NO: 3978 - RNA, 10 nt, Unknown
  source: /note="Description of Unknown: Exemplary gene or splice site sequence"
aaaguuaaag

SEQ ID NO: 3979 - RNA, 10 nt, Unknown
  source: /note="Description of Unknown: Exemplary gene or splice site sequence"
gaggugcuau

SEQ ID NO: 3980 - RNA, 10 nt, Unknown
  source: /note="Description of Unknown: Exemplary gene or splice site sequence"
cuugugugca

SEQ ID NO: 3981 - RNA, 10 nt, Unknown
  source: /note="Description of Unknown: Exemplary gene or splice site sequence"
ugagcugggg

SEQ ID NO: 3982 - RNA, 10 nt, Unknown
  source: /note="Description of Unknown: Exemplary gene or splice site sequence"
aagguauagu

SEQ ID NO: 3983 - RNA, 10 nt, Unknown
  source: /note="Description of Unknown: Exemplary gene or splice site sequence"
ggggugaggu

SEQ ID NO: 3984 - RNA, 10 nt, Unknown
  source: /note="Description of Unknown: Exemplary gene or splice site sequence"
gaggcaagca

SEQ ID NO: 3985 - RNA, 10 nt, Unknown
  source: /note="Description of Unknown: Exemplary gene or splice site sequence"
ggaguaacgu

SEQ ID NO: 3986 - RNA, 10 nt, Unknown
  source: /note="Description of Unknown: Exemplary gene or splice site sequence"
agaguaagua

SEQ ID NO: 3987 - RNA, 10 nt, Unknown
  source: /note="Description of Unknown: Exemplary gene or splice site sequence"
gaggcaacca

SEQ ID NO: 3988 - RNA, 10 nt, Unknown
  source: /note="Description of Unknown: Exemplary gene or splice site sequence"
aggguaaaug

SEQ ID NO: 3989 - RNA, 10 nt, Unknown
  source: /note="Description of Unknown: Exemplary gene or splice site sequence"
gcugugcgug

SEQ ID NO: 3990 - RNA, 10 nt, Unknown
  source: /note="Description of Unknown: Exemplary gene or splice site sequence"
gagguucgcc

SEQ ID NO: 3991 - RNA, 10 nt, Unknown
  source: /note="Description of Unknown: Exemplary gene or splice site sequence"
aaggcuugca

SEQ ID NO: 3992 - RNA, 10 nt, Unknown
  source: /note="Description of Unknown: Exemplary gene or splice site sequence"
auaguaaguc

SEQ ID NO: 3993 - RNA, 10 nt, Unknown
  source: /note="Description of Unknown: Exemplary gene or splice site sequence"
gcagcaggua

SEQ ID NO: 3994 - RNA, 10 nt, Unknown
  source: /note="Description of Unknown: Exemplary gene or splice site sequence"
agcguaagcc

SEQ ID NO: 3995 - RNA, 10 nt, Unknown
  source: /note="Description of Unknown: Exemplary gene or splice site sequence"
cugguucgaa

SEQ ID NO: 3996 - RNA, 10 nt, Unknown
  source: /note="Description of Unknown: Exemplary gene or splice site sequence"
cuggucauug

SEQ ID NO: 3997 - RNA, 10 nt, Unknown
  source: /note="Description of Unknown: Exemplary gene or splice site sequence"
gagguguagu

SEQ ID NO: 3998 - RNA, 10 nt, Unknown
  source: /note="Description of Unknown: Exemplary gene or splice site sequence"
gagguguccu

SEQ ID NO: 3999 - RNA, 10 nt, Unknown
  source: /note="Description of Unknown: Exemplary gene or splice site sequence"
agugcccuga

SEQ ID NO: 4000 - RNA, 10 nt, Unknown
  source: /note="Description of Unknown: Exemplary gene or splice site sequence"
ugugugugua

SEQ ID NO: 4001 - RNA, 10 nt, Unknown
  source: /note="Description of Unknown: Exemplary gene or splice site sequence"
cugguacagu

SEQ ID NO: 4002 - RNA, 10 nt, Unknown
  source: /note="Description of Unknown: Exemplary gene or splice site sequence"
uugguacgua

SEQ ID NO: 4003 - RNA, 10 nt, Unknown
  source: /note="Description of Unknown: Exemplary gene or splice site sequence"
ucuguacgua

SEQ ID NO: 4004 - RNA, 10 nt, Unknown
  source: /note="Description of Unknown: Exemplary gene or splice site sequence"
uaaguaauuc

SEQ ID NO: 4005 - RNA, 10 nt, Unknown
  source: /note="Description of Unknown: Exemplary gene or splice site sequence"
cacguaugug

SEQ ID NO: 4006 - RNA, 10 nt, Unknown
  source: /note="Description of Unknown: Exemplary gene or splice site sequence"
ucggugagug

SEQ ID NO: 4007 - RNA, 10 nt, Unknown
  source: /note="Description of Unknown: Exemplary gene or splice site sequence"
aagguucaga

SEQ ID NO: 4008 - RNA, 10 nt, Unknown
  source: /note="Description of Unknown: Exemplary gene or splice site sequence"
aggguacuuc

SEQ ID NO: 4009 - RNA, 10 nt, Unknown
  source: /note="Description of Unknown: Exemplary gene or splice site sequence"
gcggcagguu

SEQ ID NO: 4010 - RNA, 10 nt, Unknown
  source: /note="Description of Unknown: Exemplary gene or splice site sequence"
gaggcccgug

SEQ ID NO: 4011 - RNA, 10 nt, Unknown
  source: /note="Description of Unknown: Exemplary gene or splice site sequence"
cagguauaaa

SEQ ID NO: 4012 - RNA, 10 nt, Unknown
  source: /note="Description of Unknown: Exemplary gene or splice site sequence"
auggucaagu

SEQ ID NO: 4013 - RNA, 10 nt, Unknown
  source: /note="Description of Unknown: Exemplary gene or splice site sequence"
gugguuuguu

SEQ ID NO: 4014 - RNA, 10 nt, Unknown
  source: /note="Description of Unknown: Exemplary gene or splice site sequence"
agagugagga

SEQ ID NO: 4015 - RNA, 10 nt, Unknown
  source: /note="Description of Unknown: Exemplary gene or splice site sequence"
uaggcgugag

SEQ ID NO: 4016 - RNA, 10 nt, Unknown
  source: /note="Description of Unknown: Exemplary gene or splice site sequence"
aagguacucc

SEQ ID NO: 4017 - RNA, 10 nt, Unknown
  source: /note="Description of Unknown: Exemplary gene or splice site sequence"
gagguaugau

SEQ ID NO: 4018 - RNA, 10 nt, Unknown
  source: /note="Description of Unknown: Exemplary gene or splice site sequence"
ggggucggua

SEQ ID NO: 4019 - RNA, 10 nt, Unknown
  source: /note="Description of Unknown: Exemplary gene or splice site sequence"
acgguaugca

SEQ ID NO: 4020 - RNA, 10 nt, Unknown
  source: /note="Description of Unknown: Exemplary gene or splice site sequence"
uaaguaccug

SEQ ID NO: 4021 - RNA, 10 nt, Unknown
  source: /note="Description of Unknown: Exemplary gene or splice site sequence"
agggugggcu

SEQ ID NO: 4022 - RNA, 10 nt, Unknown
  source: /note="Description of Unknown: Exemplary gene or splice site sequence"
cuggucuguu

SEQ ID NO: 4023 - RNA, 10 nt, Unknown
  source: /note="Description of Unknown: Exemplary gene or splice site sequence"
uaggucagag

SEQ ID NO: 4024 - RNA, 10 nt, Unknown
  source: /note="Description of Unknown: Exemplary gene or splice site sequence"
cuggucagug

SEQ ID NO: 4025 - RNA, 10 nt, Unknown
  source: /note="Description of Unknown: Exemplary gene or splice site sequence"
aaggugggac

SEQ ID NO: 4026 - RNA, 10 nt, Unknown
  source: /note="Description of Unknown: Exemplary gene or splice site sequence"
gugguaguag

SEQ ID NO: 4027 - RNA, 10 nt, Unknown
  source: /note="Description of Unknown: Exemplary gene or splice site sequence"
cuaguuuagg

SEQ ID NO: 4028 - RNA, 10 nt, Unknown
  source: /note="Description of Unknown: Exemplary gene or splice site sequence"
cccgccccau

SEQ ID NO: 4029 - RNA, 10 nt, Unknown
  source: /note="Description of Unknown: Exemplary gene or splice site sequence"
gcuguacugc

SEQ ID NO: 4030 - RNA, 10 nt, Unknown
  source: /note="Description of Unknown: Exemplary gene or splice site sequence"
uagguuggug

SEQ ID NO: 4031 - RNA, 10 nt, Unknown
  source: /note="Description of Unknown: Exemplary gene or splice site sequence"
aagguccaac

SEQ ID NO: 4032 - RNA, 10 nt, Unknown
  source: /note="Description of Unknown: Exemplary gene or splice site sequence"
uuggcaggug

SEQ ID NO: 4033 - RNA, 10 nt, Unknown
  source: /note="Description of Unknown: Exemplary gene or splice site sequence"
uagguuauug

SEQ ID NO: 4034 - RNA, 10 nt, Unknown
  source: /note="Description of Unknown: Exemplary gene or splice site sequence"
gcgguggguc

SEQ ID NO: 4035 - RNA, 10 nt, Unknown
  source: /note="Description of Unknown: Exemplary gene or splice site sequence"
uguguaagau

SEQ ID NO: 4036 - RNA, 10 nt, Unknown
  source: /note="Description of Unknown: Exemplary gene or splice site sequence"
gcagccccgg

SEQ ID NO: 4037 - RNA, 10 nt, Unknown
  source: /note="Description of Unknown: Exemplary gene or splice site sequence"
caggugcuaa

SEQ ID NO: 4038 - RNA, 10 nt, Unknown
  source: /note="Description of Unknown: Exemplary gene or splice site sequence"
cagguacauc

SEQ ID NO: 4039 - RNA, 10 nt, Unknown
  source: /note="Description of Unknown: Exemplary gene or splice site sequence"
uaaguaauua

SEQ ID NO: 4040 - RNA, 10 nt, Unknown
  source: /note="Description of Unknown: Exemplary gene or splice site sequence"
uaggugguuu

SEQ ID NO: 4041 - RNA, 10 nt, Unknown
  source: /note="Description of Unknown: Exemplary gene or splice site sequence"
uguguaagcu

SEQ ID NO: 4042 - RNA, 10 nt, Unknown
  source: /note="Description of Unknown: Exemplary gene or splice site sequence"
gauguaauau

SEQ ID NO: 4043 - RNA, 10 nt, Unknown
  source: /note="Description of Unknown: Exemplary gene or splice site sequence"
gggguaauua

SEQ ID NO: 4044 - RNA, 10 nt, Unknown
  source: /note="Description of Unknown: Exemplary gene or splice site sequence"
uagguacuac

SEQ ID NO: 4045 - RNA, 10 nt, Unknown
  source: /note="Description of Unknown: Exemplary gene or splice site sequence"
ucggugggug

SEQ ID NO: 4046 - RNA, 10 nt, Unknown
  source: /note="Description of Unknown: Exemplary gene or splice site sequence"
uaagugagcc

SEQ ID NO: 4047 - RNA, 10 nt, Unknown
  source: /note="Description of Unknown: Exemplary gene or splice site sequence"
uaggugcgac

SEQ ID NO: 4048 - RNA, 10 nt, Unknown
  source: /note="Description of Unknown: Exemplary gene or splice site sequence"
gagguauggc

SEQ ID NO: 4049 - RNA, 10 nt, Unknown
  source: /note="Description of Unknown: Exemplary gene or splice site sequence"
uugguaacgu

SEQ ID NO: 4050 - RNA, 10 nt, Unknown
  source: /note="Description of Unknown: Exemplary gene or splice site sequence"
gcuguaaaaa

SEQ ID NO: 4051 - RNA, 10 nt, Unknown
  source: /note="Description of Unknown: Exemplary gene or splice site sequence"
uugguuagua

SEQ ID NO: 4052 - RNA, 10 nt, Unknown
  source: /note="Description of Unknown: Exemplary gene or splice site sequence"
auaguaaggg

SEQ ID NO: 4053 - RNA, 10 nt, Unknown
  source: /note="Description of Unknown: Exemplary gene or splice site sequence"
uugguacuag

SEQ ID NO: 4054 - RNA, 10 nt, Unknown
  source: /note="Description of Unknown: Exemplary gene or splice site sequence"
cgggcagccg

SEQ ID NO: 4055 - RNA, 10 nt, Unknown
  source: /note="Description of Unknown: Exemplary gene or splice site sequence"
caggucuggg

SEQ ID NO: 4056 - RNA, 10 nt, Unknown
  source: /note="Description of Unknown: Exemplary gene or splice site sequence"
aagguuauua

SEQ ID NO: 4057 - RNA, 10 nt, Unknown
  source: /note="Description of Unknown: Exemplary gene or splice site sequence"
agaguaaagc

SEQ ID NO: 4058 - RNA, 10 nt, Unknown
  source: /note="Description of Unknown: Exemplary gene or splice site sequence"
agagugugag

SEQ ID NO: 4059 - RNA, 10 nt, Unknown
  source: /note="Description of Unknown: Exemplary gene or splice site sequence"
uaggugcgag

SEQ ID NO: 4060 - RNA, 10 nt, Unknown
  source: /note="Description of Unknown: Exemplary gene or splice site sequence"
caaguaaacg

SEQ ID NO: 4061 - RNA, 10 nt, Unknown
  source: /note="Description of Unknown: Exemplary gene or splice site sequence"
aagguacgua

SEQ ID NO: 4062 - RNA, 10 nt, Unknown
  source: /note="Description of Unknown: Exemplary gene or splice site sequence"
ccaguaugua

SEQ ID NO: 4063 - RNA, 10 nt, Unknown
  source: /note="Description of Unknown: Exemplary gene or splice site sequence"
gagguuagca

SEQ ID NO: 4064 - RNA, 10 nt, Unknown
  source: /note="Description of Unknown: Exemplary gene or splice site sequence"
gugguaagcc

SEQ ID NO: 4065 - RNA, 10 nt, Unknown
  source: /note="Description of Unknown: Exemplary gene or splice site sequence"
gauguuugug

SEQ ID NO: 4066 - RNA, 10 nt, Unknown
  source: /note="Description of Unknown: Exemplary gene or splice site sequence"
caggugucaa

SEQ ID NO: 4067 - RNA, 10 nt, Unknown
  source: /note="Description of Unknown: Exemplary gene or splice site sequence"
caggucacca

SEQ ID NO: 4068 - RNA, 10 nt, Unknown
  source: /note="Description of Unknown: Exemplary gene or splice site sequence"
ccggugagua

SEQ ID NO: 4069 - RNA, 10 nt, Unknown
  source: /note="Description of Unknown: Exemplary gene or splice site sequence"
uugguaaaua

SEQ ID NO: 4070 - RNA, 10 nt, Unknown
  source: /note="Description of Unknown: Exemplary gene or splice site sequence"
acugcaggug

SEQ ID NO: 4071 - RNA, 10 nt, Unknown
  source: /note="Description of Unknown: Exemplary gene or splice site sequence"
ggagcaagug

SEQ ID NO: 4072 - RNA, 10 nt, Unknown
  source: /note="Description of Unknown: Exemplary gene or splice site sequence"
ucggugccuc

SEQ ID NO: 4073 - RNA, 10 nt, Unknown
  source: /note="Description of Unknown: Exemplary gene or splice site sequence"
caaguaacuu

SEQ ID NO: 4074 - RNA, 10 nt, Unknown
  source: /note="Description of Unknown: Exemplary gene or splice site sequence"
ggaguaagaa

SEQ ID NO: 4075 - RNA, 10 nt, Unknown
  source: /note="Description of Unknown: Exemplary gene or splice site sequence"
augguguguc

SEQ ID NO: 4076 - RNA, 10 nt, Unknown
  source: /note="Description of Unknown: Exemplary gene or splice site sequence"
ggggugagua

SEQ ID NO: 4077 - RNA, 10 nt, Unknown
  source: /note="Description of Unknown: Exemplary gene or splice site sequence"
agggucaggu

SEQ ID NO: 4078 - RNA, 10 nt, Unknown
  source: /note="Description of Unknown: Exemplary gene or splice site sequence"
auagugaguu

SEQ ID NO: 4079 - RNA, 10 nt, Unknown
  source: /note="Description of Unknown: Exemplary gene or splice site sequence"
cccguaggcu

SEQ ID NO: 4080 - RNA, 10 nt, Unknown
  source: /note="Description of Unknown: Exemplary gene or splice site sequence"
gacgugugua

SEQ ID NO: 4081 - RNA, 10 nt, Unknown
  source: /note="Description of Unknown: Exemplary gene or splice site sequence"
gcggugagga

SEQ ID NO: 4082 - RNA, 10 nt, Unknown
  source: /note="Description of Unknown: Exemplary gene or splice site sequence"
uaaguuuagu

SEQ ID NO: 4083 - RNA, 10 nt, Unknown
  source: /note="Description of Unknown: Exemplary gene or splice site sequence"
cggguagagg

SEQ ID NO: 4084 - RNA, 10 nt, Unknown
  source: /note="Description of Unknown: Exemplary gene or splice site sequence"
gagguggggu

SEQ ID NO: 4085 - RNA, 10 nt, Unknown
  source: /note="Description of Unknown: Exemplary gene or splice site sequence"
cacguggguu

SEQ ID NO: 4086 - RNA, 10 nt, Unknown
  source: /note="Description of Unknown: Exemplary gene or splice site sequence"
acgguaauug

SEQ ID NO: 4087 - RNA, 10 nt, Unknown
  source: /note="Description of Unknown: Exemplary gene or splice site sequence"
uuggcuccaa

SEQ ID NO: 4088 - RNA, 10 nt, Unknown
  source: /note="Description of Unknown: Exemplary gene or splice site sequence"
agcguaaguu

SEQ ID NO: 4089 - RNA, 10 nt, Unknown
  source: /note="Description of Unknown: Exemplary gene or splice site sequence"
ucaguuaagu

SEQ ID NO: 4090 - RNA, 10 nt, Unknown
  source: /note="Description of Unknown: Exemplary gene or splice site sequence"
caaguacgug

SEQ ID NO: 4091 - RNA, 10 nt, Unknown
  source: /note="Description of Unknown: Exemplary gene or splice site sequence"
augguggggu

SEQ ID NO: 4092 - RNA, 10 nt, Unknown
  source: /note="Description of Unknown: Exemplary gene or splice site sequence"
cagguaauca

SEQ ID NO: 4093 - RNA, 10 nt, Unknown
  source: /note="Description of Unknown: Exemplary gene or splice site sequence"
caggccaagg

SEQ ID NO: 4094 - RNA, 10 nt, Unknown
  source: /note="Description of Unknown: Exemplary gene or splice site sequence"
guggugagag

SEQ ID NO: 4095 - RNA, 10 nt, Unknown
  source: /note="Description of Unknown: Exemplary gene or splice site sequence"
uaggcaugug

SEQ ID NO: 4096 - RNA, 10 nt, Unknown
  source: /note="Description of Unknown: Exemplary gene or splice site sequence"
uugguaccuu

SEQ ID NO: 4097 - RNA, 10 nt, Unknown
  source: /note="Description of Unknown: Exemplary gene or splice site sequence"
cuggugugcc

SEQ ID NO: 4098 - RNA, 10 nt, Unknown
  source: /note="Description of Unknown: Exemplary gene or splice site sequence"
acaguugcca

SEQ ID NO: 4099 - RNA, 10 nt, Unknown
  source: /note="Description of Unknown: Exemplary gene or splice site sequence"
uugguaauau

SEQ ID NO: 4100 - RNA, 10 nt, Unknown
  source: /note="Description of Unknown: Exemplary gene or splice site sequence"
gaggugcaug

SEQ ID NO: 4101 - RNA, 10 nt, Unknown
  source: /note="Description of Unknown: Exemplary gene or splice site sequence"
ugugugugug

SEQ ID NO: 4102 - RNA, 10 nt, Unknown
  source: /note="Description of Unknown: Exemplary gene or splice site sequence"
gcgguacaca

SEQ ID NO: 4103 - RNA, 10 nt, Unknown
  source: /note="Description of Unknown: Exemplary gene or splice site sequence"
agaguaugcu

SEQ ID NO: 4104 - RNA, 10 nt, Unknown
  source: /note="Description of Unknown: Exemplary gene or splice site sequence"
ucugugcggg

SEQ ID NO: 4105 - RNA, 10 nt, Unknown
  source: /note="Description of Unknown: Exemplary gene or splice site sequence"
gcgguuagca

SEQ ID NO: 4106 - RNA, 10 nt, Unknown
  source: /note="Description of Unknown: Exemplary gene or splice site sequence"
gaagugagua

SEQ ID NO: 4107 - RNA, 10 nt, Unknown
  source: /note="Description of Unknown: Exemplary gene or splice site sequence"
caggugacag

SEQ ID NO: 4108 - RNA, 10 nt, Unknown
  source: /note="Description of Unknown: Exemplary gene or splice site sequence"
gaggccagcc

SEQ ID NO: 4109 - RNA, 10 nt, Unknown
  source: /note="Description of Unknown: Exemplary gene or splice site sequence"
gaggucuccu

SEQ ID NO: 4110 - RNA, 10 nt, Unknown
  source: /note="Description of Unknown: Exemplary gene or splice site sequence"
cugguagggc

SEQ ID NO: 4111 - RNA, 10 nt, Unknown
  source: /note="Description of Unknown: Exemplary gene or splice site sequence"
cggguaagug

SEQ ID NO: 4112 - RNA, 10 nt, Unknown
  source: /note="Description of Unknown: Exemplary gene or splice site sequence"
cagguaaucu

SEQ ID NO: 4113 - RNA, 10 nt, Unknown
  source: /note="Description of Unknown: Exemplary gene or splice site sequence"
gugguaggua

SEQ ID NO: 4114 - RNA, 10 nt, Unknown
  source: /note="Description of Unknown: Exemplary gene or splice site sequence"
aaggccagug

SEQ ID NO: 4115 - RNA, 10 nt, Unknown
  source: /note="Description of Unknown: Exemplary gene or splice site sequence"
aaagugaauc

SEQ ID NO: 4116 - RNA, 10 nt, Unknown
  source: /note="Description of Unknown: Exemplary gene or splice site sequence"
acgguuacgu

SEQ ID NO: 4117 - RNA, 10 nt, Unknown
  source: /note="Description of Unknown: Exemplary gene or splice site sequence"
cgggugagac

SEQ ID NO: 4118 - RNA, 10 nt, Unknown
  source: /note="Description of Unknown: Exemplary gene or splice site sequence"
cuaguacgag

SEQ ID NO: 4119 - RNA, 10 nt, Unknown
  source: /note="Description of Unknown: Exemplary gene or splice site sequence"
gcugugaggu

SEQ ID NO: 4120 - RNA, 10 nt, Unknown
  source: /note="Description of Unknown: Exemplary gene or splice site sequence"
cugguaugaa

SEQ ID NO: 4121 - RNA, 10 nt, Unknown
  source: /note="Description of Unknown: Exemplary gene or splice site sequence"
gguguacgac

SEQ ID NO: 4122 - RNA, 10 nt, Unknown
  source: /note="Description of Unknown: Exemplary gene or splice site sequence"
cuugugagug

SEQ ID NO: 4123 - RNA, 10 nt, Unknown
  source: /note="Description of Unknown: Exemplary gene or splice site sequence"
ucggugagga

SEQ ID NO: 4124 - RNA, 10 nt, Unknown
  source: /note="Description of Unknown: Exemplary gene or splice site sequence"
uggguaaaca

SEQ ID NO: 4125 - RNA, 10 nt, Unknown
  source: /note="Description of Unknown: Exemplary gene or splice site sequence"
ucgguacgug

SEQ ID NO: 4126 - RNA, 10 nt, Unknown
  source: /note="Description of Unknown: Exemplary gene or splice site sequence"
uagguagcag

SEQ ID NO: 4127 - RNA, 10 nt, Unknown
  source: /note="Description of Unknown: Exemplary gene or splice site sequence"
gagguuccaa

SEQ ID NO: 4128 - RNA, 10 nt, Unknown
  source: /note="Description of Unknown: Exemplary gene or splice site sequence"
cugguaugga

SEQ ID NO: 4129 - RNA, 10 nt, Unknown
  source: /note="Description of Unknown: Exemplary gene or splice site sequence"
cagguuuccc

SEQ ID NO: 4130 - RNA, 10 nt, Unknown
  source: /note="Description of Unknown: Exemplary gene or splice site sequence"
caggucucug

SEQ ID NO: 4131 - RNA, 10 nt, Unknown
  source: /note="Description of Unknown: Exemplary gene or splice site sequence"
gcgguagggg

SEQ ID NO: 4132 - RNA, 10 nt, Unknown
  source: /note="Description of Unknown: Exemplary gene or splice site sequence"
guuguuuccc

SEQ ID NO: 4133 - RNA, 10 nt, Unknown
  source: /note="Description of Unknown: Exemplary gene or splice site sequence"
aaagcaucca

SEQ ID NO: 4134 - RNA, 10 nt, Unknown
  source: /note="Description of Unknown: Exemplary gene or splice site sequence"
aaggugcuca

SEQ ID NO: 4135 - RNA, 10 nt, Unknown
  source: /note="Description of Unknown: Exemplary gene or splice site sequence"
aagguucaac

SEQ ID NO: 4136 - RNA, 10 nt, Unknown
  source: /note="Description of Unknown: Exemplary gene or splice site sequence"
cagguuuaca

SEQ ID NO: 4137 - RNA, 10 nt, Unknown
  source: /note="Description of Unknown: Exemplary gene or splice site sequence"
uagguaagaa

SEQ ID NO: 4138 - RNA, 10 nt, Unknown
  source: /note="Description of Unknown: Exemplary gene or splice site sequence"
aggguauccu

SEQ ID NO: 4139 - RNA, 10 nt, Unknown
  source: /note="Description of Unknown: Exemplary gene or splice site sequence"
gugguaauau

SEQ ID NO: 4140 - RNA, 10 nt, Unknown
  source: /note="Description of Unknown: Exemplary gene or splice site sequence"
uggguaugga

SEQ ID NO: 4141 - RNA, 10 nt, Unknown
  source: /note="Description of Unknown: Exemplary gene or splice site sequence"
cugguuuggc

SEQ ID NO: 4142 - RNA, 10 nt, Unknown
  source: /note="Description of Unknown: Exemplary gene or splice site sequence"
augguauauc

SEQ ID NO: 4143 - RNA, 10 nt, Unknown
  source: /note="Description of Unknown: Exemplary gene or splice site sequence"
aaaguaaacu

SEQ ID NO: 4144 - RNA, 10 nt, Unknown
  source: /note="Description of Unknown: Exemplary gene or splice site sequence"
cugguauaga

SEQ ID NO: 4145 - RNA, 10 nt, Unknown
  source: /note="Description of Unknown: Exemplary gene or splice site sequence"
uagguacuug

SEQ ID NO: 4146 - RNA, 10 nt, Unknown
  source: /note="Description of Unknown: Exemplary gene or splice site sequence"
gcaguaggug

SEQ ID NO: 4147 - RNA, 10 nt, Unknown
  source: /note="Description of Unknown: Exemplary gene or splice site sequence"
aguguauguc

SEQ ID NO: 4148 - RNA, 10 nt, Unknown
  source: /note="Description of Unknown: Exemplary gene or splice site sequence"
cugguggccu

SEQ ID NO: 4149 - RNA, 10 nt, Unknown
  source: /note="Description of Unknown: Exemplary gene or splice site sequence"
uugguguaag

SEQ ID NO: 4150 - RNA, 10 nt, Unknown
  source: /note="Description of Unknown: Exemplary gene or splice site sequence"
cgggucucgg

SEQ ID NO: 4151 - RNA, 10 nt, Unknown
  source: /note="Description of Unknown: Exemplary gene or splice site sequence"
cucguuaguu

SEQ ID NO: 4152 - RNA, 10 nt, Unknown
  source: /note="Description of Unknown: Exemplary gene or splice site sequence"
caggugguca

SEQ ID NO: 4153 - RNA, 10 nt, Unknown
  source: /note="Description of Unknown: Exemplary gene or splice site sequence"
acgguaaguc

SEQ ID NO: 4154 - RNA, 10 nt, Unknown
  source: /note="Description of Unknown: Exemplary gene or splice site sequence"
acaguaaugu

SEQ ID NO: 4155 - RNA, 10 nt, Unknown
  source: /note="Description of Unknown: Exemplary gene or splice site sequence"
ccuguaaggu

SEQ ID NO: 4156 - RNA, 10 nt, Unknown
  source: /note="Description of Unknown: Exemplary gene or splice site sequence"
gagguuaagu

SEQ ID NO: 4157 - RNA, 10 nt, Unknown
  source: /note="Description of Unknown: Exemplary gene or splice site sequence"
uugguaaaca

SEQ ID NO: 4158 - RNA, 10 nt, Unknown
  source: /note="Description of Unknown: Exemplary gene or splice site sequence"
aagguagugu

SEQ ID NO: 4159 - RNA, 10 nt, Unknown
  source: /note="Description of Unknown: Exemplary gene or splice site sequence"
gagguguggc

SEQ ID NO: 4160 - RNA, 10 nt, Unknown
  source: /note="Description of Unknown: Exemplary gene or splice site sequence"
cagguacgga

SEQ ID NO: 4161 - RNA, 10 nt, Unknown
  source: /note="Description of Unknown: Exemplary gene or splice site sequence"
aaggucauca

SEQ ID NO: 4162 - RNA, 10 nt, Unknown
  source: /note="Description of Unknown: Exemplary gene or splice site sequence"
caaguaggca

SEQ ID NO: 4163 - RNA, 10 nt, Unknown
  source: /note="Description of Unknown: Exemplary gene or splice site sequence"
caggugaaac

SEQ ID NO: 4164 - RNA, 10 nt, Unknown
  source: /note="Description of Unknown: Exemplary gene or splice site sequence"
aaugcaagug

SEQ ID NO: 4165 - RNA, 10 nt, Unknown
  source: /note="Description of Unknown: Exemplary gene or splice site sequence"
cauguaauuc

SEQ ID NO: 4166 - RNA, 10 nt, Unknown
  source: /note="Description of Unknown: Exemplary gene or splice site sequence"
caggugguuu

SEQ ID NO: 4167 - RNA, 10 nt, Unknown
  source: /note="Description of Unknown: Exemplary gene or splice site sequence"
aaggucggug

SEQ ID NO: 4168 - RNA, 10 nt, Unknown
  source: /note="Description of Unknown: Exemplary gene or splice site sequence"
aguguaugga

SEQ ID NO: 4169 - RNA, 10 nt, Unknown
  source: /note="Description of Unknown: Exemplary gene or splice site sequence"
aacguaagau

SEQ ID NO: 4170 - RNA, 10 nt, Unknown
  source: /note="Description of Unknown: Exemplary gene or splice site sequence"
gugguaaggu

SEQ ID NO: 4171 - RNA, 10 nt, Unknown
  source: /note="Description of Unknown: Exemplary gene or splice site sequence"
acuguuagua

SEQ ID NO: 4172 - RNA, 10 nt, Unknown
  source: /note="Description of Unknown: Exemplary gene or splice site sequence"
uuggugagcu

SEQ ID NO: 4173 - RNA, 10 nt, Unknown
  source: /note="Description of Unknown: Exemplary gene or splice site sequence"
uguguacgua

SEQ ID NO: 4174 - RNA, 10 nt, Unknown
  source: /note="Description of Unknown: Exemplary gene or splice site sequence"
gaggucagcc

SEQ ID NO: 4175 - RNA, 10 nt, Unknown
  source: /note="Description of Unknown: Exemplary gene or splice site sequence"
gagguagaau

SEQ ID NO: 4176 - RNA, 10 nt, Unknown
  source: /note="Description of Unknown: Exemplary gene or splice site sequence"
uguguaacac

SEQ ID NO: 4177 - RNA, 10 nt, Unknown
  source: /note="Description of Unknown: Exemplary gene or splice site sequence"
aguguaaggc

SEQ ID NO: 4178 - RNA, 10 nt, Unknown
  source: /note="Description of Unknown: Exemplary gene or splice site sequence"
gaggucugcu

SEQ ID NO: 4179 - RNA, 10 nt, Unknown
  source: /note="Description of Unknown: Exemplary gene or splice site sequence"
aacguaagcu

SEQ ID NO: 4180 - RNA, 10 nt, Unknown
  source: /note="Description of Unknown: Exemplary gene or splice site sequence"
caggucugca

SEQ ID NO: 4181 - RNA, 10 nt, Unknown
  source: /note="Description of Unknown: Exemplary gene or splice site sequence"
gccgugagcc

SEQ ID NO: 4182 - RNA, 10 nt, Unknown
  source: /note="Description of Unknown: Exemplary gene or splice site sequence"
caggcaacuu

SEQ ID NO: 4183 - RNA, 10 nt, Unknown
  source: /note="Description of Unknown: Exemplary gene or splice site sequence"
caggugcgcu

SEQ ID NO: 4184 - RNA, 10 nt, Unknown
  source: /note="Description of Unknown: Exemplary gene or splice site sequence"
cggguaaacc

SEQ ID NO: 4185 - RNA, 10 nt, Unknown
  source: /note="Description of Unknown: Exemplary gene or splice site sequence"
ccggucaguc

SEQ ID NO: 4186 - RNA, 10 nt, Unknown
  source: /note="Description of Unknown: Exemplary gene or splice site sequence"
uaggugggcg

SEQ ID NO: 4187 - RNA, 10 nt, Unknown
  source: /note="Description of Unknown: Exemplary gene or splice site sequence"
gcggucaguu

SEQ ID NO: 4188 - RNA, 10 nt, Unknown
  source: /note="Description of Unknown: Exemplary gene or splice site sequence"
gggguggguc

SEQ ID NO: 4189 - RNA, 10 nt, Unknown
  source: /note="Description of Unknown: Exemplary gene or splice site sequence"
agcguaauag

SEQ ID NO: 4190 - RNA, 10 nt, Unknown
  source: /note="Description of Unknown: Exemplary gene or splice site sequence"
acggugaguc

SEQ ID NO: 4191 - RNA, 10 nt, Unknown
  source: /note="Description of Unknown: Exemplary gene or splice site sequence"
cagguuggua

SEQ ID NO: 4192 - RNA, 10 nt, Unknown
  source: /note="Description of Unknown: Exemplary gene or splice site sequence"
gagguggcuu

SEQ ID NO: 4193 - RNA, 10 nt, Unknown
  source: /note="Description of Unknown: Exemplary gene or splice site sequence"
auaguauuga

SEQ ID NO: 4194 - RNA, 10 nt, Unknown
  source: /note="Description of Unknown: Exemplary gene or splice site sequence"
ugagucgucc

SEQ ID NO: 4195 - RNA, 10 nt, Unknown
  source: /note="Description of Unknown: Exemplary gene or splice site sequence"
caggugcucu

SEQ ID NO: 4196 - RNA, 10 nt, Unknown
  source: /note="Description of Unknown: Exemplary gene or splice site sequence"
uacguaauau

SEQ ID NO: 4197 - RNA, 10 nt, Unknown
  source: /note="Description of Unknown: Exemplary gene or splice site sequence"
gcuguccuga

SEQ ID NO: 4198 - RNA, 10 nt, Unknown
  source: /note="Description of Unknown: Exemplary gene or splice site sequence"
caggcugcac

SEQ ID NO: 4199 - RNA, 10 nt, Unknown
  source: /note="Description of Unknown: Exemplary gene or splice site sequence"
gcgguaagaa

SEQ ID NO: 4200 - RNA, 10 nt, Unknown
  source: /note="Description of Unknown: Exemplary gene or splice site sequence"
uaaguuacuu

SEQ ID NO: 4201 - RNA, 10 nt, Unknown
  source: /note="Description of Unknown: Exemplary gene or splice site sequence"
uaaguaaaua

SEQ ID NO: 4202 - RNA, 10 nt, Unknown
  source: /note="Description of Unknown: Exemplary gene or splice site sequence"
gggguauaac

SEQ ID NO: 4203 - RNA, 10 nt, Unknown
  source: /note="Description of Unknown: Exemplary gene or splice site sequence"
gaggugcauu

SEQ ID NO: 4204 - RNA, 10 nt, Unknown
  source: /note="Description of Unknown: Exemplary gene or splice site sequence"
ucgguaaugu

SEQ ID NO: 4205 - RNA, 10 nt, Unknown
  source: /note="Description of Unknown: Exemplary gene or splice site sequence"
gaggcacgga

SEQ ID NO: 4206 - RNA, 10 nt, Unknown
  source: /note="Description of Unknown: Exemplary gene or splice site sequence"
agggugugga

SEQ ID NO: 4207 - RNA, 10 nt, Unknown
  source: /note="Description of Unknown: Exemplary gene or splice site sequence"
uggguauaug

SEQ ID NO: 4208 - RNA, 10 nt, Unknown
  source: /note="Description of Unknown: Exemplary gene or splice site sequence"
ugagugagac

SEQ ID NO: 4209 - RNA, 10 nt, Unknown
  source: /note="Description of Unknown: Exemplary gene or splice site sequence"
aaggcaaagg

SEQ ID NO: 4210 - RNA, 10 nt, Unknown
  source: /note="Description of Unknown: Exemplary gene or splice site sequence"
aguguuuguu

SEQ ID NO: 4211 - RNA, 10 nt, Unknown
  source: /note="Description of Unknown: Exemplary gene or splice site sequence"
augguauugg

SEQ ID NO: 4212 - RNA, 10 nt, Unknown
  source: /note="Description of Unknown: Exemplary gene or splice site sequence"
caggugcugu

SEQ ID NO: 4213 - RNA, 10 nt, Unknown
  source: /note="Description of Unknown: Exemplary gene or splice site sequence"
gagguccgcg

SEQ ID NO: 4214 - RNA, 10 nt, Unknown
  source: /note="Description of Unknown: Exemplary gene or splice site sequence"
auggcaagcu

SEQ ID NO: 4215 - RNA, 10 nt, Unknown
  source: /note="Description of Unknown: Exemplary gene or splice site sequence"
ucgguaauau

SEQ ID NO: 4216 - RNA, 10 nt, Unknown
  source: /note="Description of Unknown: Exemplary gene or splice site sequence"
caggcaacaa

SEQ ID NO: 4217 - RNA, 10 nt, Unknown
  source: /note="Description of Unknown: Exemplary gene or splice site sequence"
cuggucucgc

SEQ ID NO: 4218 - RNA, 10 nt, Unknown
  source: /note="Description of Unknown: Exemplary gene or splice site sequence"
uagguaacga

SEQ ID NO: 4219 - RNA, 10 nt, Unknown
  source: /note="Description of Unknown: Exemplary gene or splice site sequence"
cggguaaggu

SEQ ID NO: 4220 - RNA, 10 nt, Unknown
  source: /note="Description of Unknown: Exemplary gene or splice site sequence"
uagguaaugc

SEQ ID NO: 4221 - RNA, 10 nt, Unknown
  source: /note="Description of Unknown: Exemplary gene or splice site sequence"
acaguaggua

SEQ ID NO: 4222 - RNA, 10 nt, Unknown
  source: /note="Description of Unknown: Exemplary gene or splice site sequence"
gcuguucgaa

SEQ ID NO: 4223 - RNA, 10 nt, Unknown
  source: /note="Description of Unknown: Exemplary gene or splice site sequence"
aagguuaugc

SEQ ID NO: 4224 - RNA, 10 nt, Unknown
  source: /note="Description of Unknown: Exemplary gene or splice site sequence"
agaguuaguu

SEQ ID NO: 4225 - RNA, 10 nt, Unknown
  source: /note="Description of Unknown: Exemplary gene or splice site sequence"
ugagugugcg

SEQ ID NO: 4226 - RNA, 10 nt, Unknown
  source: /note="Description of Unknown: Exemplary gene or splice site sequence"
caugugcuuu

SEQ ID NO: 4227 - RNA, 10 nt, Unknown
  source: /note="Description of Unknown: Exemplary gene or splice site sequence"
aggguguguu

SEQ ID NO: 4228 - RNA, 10 nt, Unknown
  source: /note="Description of Unknown: Exemplary gene or splice site sequence"
acaguuaagg

SEQ ID NO: 4229 - RNA, 10 nt, Unknown
  source: /note="Description of Unknown: Exemplary gene or splice site sequence"
acagugaggg

SEQ ID NO: 4230 - RNA, 10 nt, Unknown
  source: /note="Description of Unknown: Exemplary gene or splice site sequence"
gauguauacc

SEQ ID NO: 4231 - RNA, 10 nt, Unknown
  source: /note="Description of Unknown: Exemplary gene or splice site sequence"
uuaguaagcu

SEQ ID NO: 4232 - RNA, 10 nt, Unknown
  source: /note="Description of Unknown: Exemplary gene or splice site sequence"
agagcugcgu

SEQ ID NO: 4233 - RNA, 10 nt, Unknown
  source: /note="Description of Unknown: Exemplary gene or splice site sequence"
aaggugaaaa

SEQ ID NO: 4234 - RNA, 10 nt, Unknown
  source: /note="Description of Unknown: Exemplary gene or splice site sequence"
aagguaccua

SEQ ID NO: 4235 - RNA, 10 nt, Unknown
  source: /note="Description of Unknown: Exemplary gene or splice site sequence"
gagguaucag

SEQ ID NO: 4236 - RNA, 10 nt, Unknown
  source: /note="Description of Unknown: Exemplary gene or splice site sequence"
augguaugua

SEQ ID NO: 4237 - RNA, 10 nt, Unknown
  source: /note="Description of Unknown: Exemplary gene or splice site sequence"
uuggugagcc

SEQ ID NO: 4238 - RNA, 10 nt, Unknown
  source: /note="Description of Unknown: Exemplary gene or splice site sequence"
cagguaccga

SEQ ID NO: 4239 - RNA, 10 nt, Unknown
  source: /note="Description of Unknown: Exemplary gene or splice site sequence"
agaguaaacu

SEQ ID NO: 4240 - RNA, 10 nt, Unknown
  source: /note="Description of Unknown: Exemplary gene or splice site sequence"
aaggugcaua

SEQ ID NO: 4241 - RNA, 10 nt, Unknown
  source: /note="Description of Unknown: Exemplary gene or splice site sequence"
ccggugugug

SEQ ID NO: 4242 - RNA, 10 nt, Unknown
  source: /note="Description of Unknown: Exemplary gene or splice site sequence"
gggguuuggc

SEQ ID NO: 4243 - RNA, 10 nt, Unknown
  source: /note="Description of Unknown: Exemplary gene or splice site sequence"
uugguaacca

SEQ ID NO: 4244 - RNA, 10 nt, Unknown
  source: /note="Description of Unknown: Exemplary gene or splice site sequence"
ucuguuggua

SEQ ID NO: 4245 - RNA, 10 nt, Unknown
  source: /note="Description of Unknown: Exemplary gene or splice site sequence"
uugguauguc

SEQ ID NO: 4246 - RNA, 10 nt, Unknown
  source: /note="Description of Unknown: Exemplary gene or splice site sequence"
aaggugcguc

SEQ ID NO: 4247 - RNA, 10 nt, Unknown
  source: /note="Description of Unknown: Exemplary gene or splice site sequence"
uuuguaagcc

SEQ ID NO: 4248 - RNA, 10 nt, Unknown
  source: /note="Description of Unknown: Exemplary gene or splice site sequence"
cugguaaacu

SEQ ID NO: 4249 - RNA, 10 nt, Unknown
  source: /note="Description of Unknown: Exemplary gene or splice site sequence"
ucgguaauuu

SEQ ID NO: 4250 - RNA, 10 nt, Unknown
  source: /note="Description of Unknown: Exemplary gene or splice site sequence"
cugguaggcu

SEQ ID NO: 4251 - RNA, 10 nt, Unknown
  source: /note="Description of Unknown: Exemplary gene or splice site sequence"
gaggucugua

SEQ ID NO: 4252 - RNA, 10 nt, Unknown
  source: /note="Description of Unknown: Exemplary gene or splice site sequence"
cugguaaagg

SEQ ID NO: 4253 - RNA, 10 nt, Unknown
  source: /note="Description of Unknown: Exemplary gene or splice site sequence"
cagguguggu

SEQ ID NO: 4254 - RNA, 10 nt, Unknown
  source: /note="Description of Unknown: Exemplary gene or splice site sequence"
ucgguacguc

SEQ ID NO: 4255 - RNA, 10 nt, Unknown
  source: /note="Description of Unknown: Exemplary gene or splice site sequence"
caggugccag

SEQ ID NO: 4256 - RNA, 10 nt, Unknown
  source: /note="Description of Unknown: Exemplary gene or splice site sequence"
acagcuagua

SEQ ID NO: 4257 - RNA, 10 nt, Unknown
  source: /note="Description of Unknown: Exemplary gene or splice site sequence"
aagguauagc

SEQ ID NO: 4258 - RNA, 10 nt, Unknown
  source: /note="Description of Unknown: Exemplary gene or splice site sequence"
cugguaggag

SEQ ID NO: 4259 - RNA, 10 nt, Unknown
  source: /note="Description of Unknown: Exemplary gene or splice site sequence"
gcuguacgua

SEQ ID NO: 4260 - RNA, 10 nt, Unknown
  source: /note="Description of Unknown: Exemplary gene or splice site sequence"
caagcacgag

SEQ ID NO: 4261 - RNA, 10 nt, Unknown
  source: /note="Description of Unknown: Exemplary gene or splice site sequence"
cuaguaagac

SEQ ID NO: 4262 - RNA, 10 nt, Unknown
  source: /note="Description of Unknown: Exemplary gene or splice site sequence"
cccguaagcg

SEQ ID NO: 4263 - RNA, 10 nt, Unknown
  source: /note="Description of Unknown: Exemplary gene or splice site sequence"
gagguccagg

SEQ ID NO: 4264 - RNA, 10 nt, Unknown
  source: /note="Description of Unknown: Exemplary gene or splice site sequence"
aagguggggc

SEQ ID NO: 4265 - RNA, 10 nt, Unknown
  source: /note="Description of Unknown: Exemplary gene or splice site sequence"
cagguaaacg

SEQ ID NO: 4266 - RNA, 10 nt, Unknown
  source: /note="Description of Unknown: Exemplary gene or splice site sequence"
ucgguaacuu

SEQ ID NO: 4267 - RNA, 10 nt, Unknown
  source: /note="Description of Unknown: Exemplary gene or splice site sequence"
gaggugcgca

SEQ ID NO: 4268 - RNA, 10 nt, Unknown
  source: /note="Description of Unknown: Exemplary gene or splice site sequence"
acggugugac

SEQ ID NO: 4269 - RNA, 10 nt, Unknown
  source: /note="Description of Unknown: Exemplary gene or splice site sequence"
gugguaugug

SEQ ID NO: 4270 - RNA, 10 nt, Unknown
  source: /note="Description of Unknown: Exemplary gene or splice site sequence"
aaaguaucug

SEQ ID NO: 4271 - RNA, 10 nt, Unknown
  source: /note="Description of Unknown: Exemplary gene or splice site sequence"
cggguaugua

SEQ ID NO: 4272 - RNA, 10 nt, Unknown
  source: /note="Description of Unknown: Exemplary gene or splice site sequence"
aaaguauuua

SEQ ID NO: 4273 - RNA, 10 nt, Unknown
  source: /note="Description of Unknown: Exemplary gene or splice site sequence"
acgguaugag

SEQ ID NO: 4274 - RNA, 10 nt, Unknown
  source: /note="Description of Unknown: Exemplary gene or splice site sequence"
agaguaaaau

SEQ ID NO: 4275 - RNA, 10 nt, Unknown
  source: /note="Description of Unknown: Exemplary gene or splice site sequence"
gcuguauggc

SEQ ID NO: 4276 - RNA, 10 nt, Unknown
  source: /note="Description of Unknown: Exemplary gene or splice site sequence"
gcaguaauaa

SEQ ID NO: 4277 - RNA, 10 nt, Unknown
  source: /note="Description of Unknown: Exemplary gene or splice site sequence"
uaaguauuua

SEQ ID NO: 4278 - RNA, 10 nt, Unknown
  source: /note="Description of Unknown: Exemplary gene or splice site sequence"
auugcaggag

SEQ ID NO: 4279 - RNA, 10 nt, Unknown
  source: /note="Description of Unknown: Exemplary gene or splice site sequence"
ccgguaagaa

SEQ ID NO: 4280 - RNA, 10 nt, Unknown
  source: /note="Description of Unknown: Exemplary gene or splice site sequence"
gagguuuguc

SEQ ID NO: 4281 - RNA, 10 nt, Unknown
  source: /note="Description of Unknown: Exemplary gene or splice site sequence"
aaaguaugag

SEQ ID NO: 4282 - RNA, 10 nt, Unknown
  source: /note="Description of Unknown: Exemplary gene or splice site sequence"
gauguuagua

SEQ ID NO: 4283 - RNA, 10 nt, Unknown
  source: /note="Description of Unknown: Exemplary gene or splice site sequence"
aagguaccga

SEQ ID NO: 4284 - RNA, 10 nt, Unknown
  source: /note="Description of Unknown: Exemplary gene or splice site sequence"
ccaguaauua

SEQ ID NO: 4285 - RNA, 10 nt, Unknown
  source: /note="Description of Unknown: Exemplary gene or splice site sequence"
gugguaugcg

SEQ ID NO: 4286 - RNA, 10 nt, Unknown
  source: /note="Description of Unknown: Exemplary gene or splice site sequence"
auggugcgcu

SEQ ID NO: 4287 - RNA, 10 nt, Unknown
  source: /note="Description of Unknown: Exemplary gene or splice site sequence"
caggucuaug

SEQ ID NO: 4288 - RNA, 10 nt, Unknown
  source: /note="Description of Unknown: Exemplary gene or splice site sequence"
cuaguaagau

SEQ ID NO: 4289 - RNA, 10 nt, Unknown
  source: /note="Description of Unknown: Exemplary gene or splice site sequence"
gagguaacgu

SEQ ID NO: 4290 - RNA, 10 nt, Unknown
  source: /note="Description of Unknown: Exemplary gene or splice site sequence"
cuggucccgg

SEQ ID NO: 4291 - RNA, 10 nt, Unknown
  source: /note="Description of Unknown: Exemplary gene or splice site sequence"
gagguccuuc

SEQ ID NO: 4292 - RNA, 10 nt, Unknown
  source: /note="Description of Unknown: Exemplary gene or splice site sequence"
acggucaccc

SEQ ID NO: 4293 - RNA, 10 nt, Unknown
  source: /note="Description of Unknown: Exemplary gene or splice site sequence"
augguaauag

SEQ ID NO: 4294 - RNA, 10 nt, Unknown
  source: /note="Description of Unknown: Exemplary gene or splice site sequence"
uuuguaacac

SEQ ID NO: 4295 - RNA, 10 nt, Unknown
  source: /note="Description of Unknown: Exemplary gene or splice site sequence"
uggguaugau

SEQ ID NO: 4296 - RNA, 10 nt, Unknown
  source: /note="Description of Unknown: Exemplary gene or splice site sequence"
caggcccccc

SEQ ID NO: 4297 - RNA, 10 nt, Unknown
  source: /note="Description of Unknown: Exemplary gene or splice site sequence"
agaguaguaa

SEQ ID NO: 4298 - RNA, 10 nt, Unknown
  source: /note="Description of Unknown: Exemplary gene or splice site sequence"
uggguugguu

SEQ ID NO: 4299 - RNA, 10 nt, Unknown
  source: /note="Description of Unknown: Exemplary gene or splice site sequence"
gaggugcggc

SEQ ID NO: 4300 - RNA, 10 nt, Unknown
  source: /note="Description of Unknown: Exemplary gene or splice site sequence"
ucuguacggg

SEQ ID NO: 4301 - RNA, 10 nt, Unknown
  source: /note="Description of Unknown: Exemplary gene or splice site sequence"
cgggugcgug

SEQ ID NO: 4302 - RNA, 10 nt, Unknown
  source: /note="Description of Unknown: Exemplary gene or splice site sequence"
cauguaagga

SEQ ID NO: 4303 - RNA, 10 nt, Unknown
  source: /note="Description of Unknown: Exemplary gene or splice site sequence"
gauguaugcu

SEQ ID NO: 4304 - RNA, 10 nt, Unknown
  source: /note="Description of Unknown: Exemplary gene or splice site sequence"
ucugcaauuc

SEQ ID NO: 4305 - RNA, 10 nt, Unknown
  source: /note="Description of Unknown: Exemplary gene or splice site sequence"
uugguggggg

SEQ ID NO: 4306 - RNA, 10 nt, Unknown
  source: /note="Description of Unknown: Exemplary gene or splice site sequence"
ugagcucaaa

SEQ ID NO: 4307 - RNA, 10 nt, Unknown
  source: /note="Description of Unknown: Exemplary gene or splice site sequence"
ucgguaugua

SEQ ID NO: 4308 - RNA, 10 nt, Unknown
  source: /note="Description of Unknown: Exemplary gene or splice site sequence"
uaaguaugcc

SEQ ID NO: 4309 - RNA, 10 nt, Unknown
  source: /note="Description of Unknown: Exemplary gene or splice site sequence"
cagguuugca

SEQ ID NO: 4310 - RNA, 10 nt, Unknown
  source: /note="Description of Unknown: Exemplary gene or splice site sequence"
acggugagag

SEQ ID NO: 4311 - RNA, 10 nt, Unknown
  source: /note="Description of Unknown: Exemplary gene or splice site sequence"
cagguguuuu

SEQ ID NO: 4312 - RNA, 10 nt, Unknown
  source: /note="Description of Unknown: Exemplary gene or splice site sequence"
guggugagcc

SEQ ID NO: 4313 - RNA, 10 nt, Unknown
  source: /note="Description of Unknown: Exemplary gene or splice site sequence"
aggguacaua

SEQ ID NO: 4314 - RNA, 10 nt, Unknown
  source: /note="Description of Unknown: Exemplary gene or splice site sequence"
uagguaaccc

SEQ ID NO: 4315 - RNA, 10 nt, Unknown
  source: /note="Description of Unknown: Exemplary gene or splice site sequence"
guggucagua

SEQ ID NO: 4316 - RNA, 10 nt, Unknown
  source: /note="Description of Unknown: Exemplary gene or splice site sequence"
cuggugagcc

SEQ ID NO: 4317 - RNA, 10 nt, Unknown
  source: /note="Description of Unknown: Exemplary gene or splice site sequence"
auagucguga

SEQ ID NO: 4318 - RNA, 10 nt, Unknown
  source: /note="Description of Unknown: Exemplary gene or splice site sequence"
gaggucaaaa

SEQ ID NO: 4319 - RNA, 10 nt, Unknown
  source: /note="Description of Unknown: Exemplary gene or splice site sequence"
cguguagcuu

SEQ ID NO: 4320 - RNA, 10 nt, Unknown
  source: /note="Description of Unknown: Exemplary gene or splice site sequence"
cagguguuug

SEQ ID NO: 4321 - RNA, 10 nt, Unknown
  source: /note="Description of Unknown: Exemplary gene or splice site sequence"
cagguuggac

SEQ ID NO: 4322 - RNA, 10 nt, Unknown
  source: /note="Description of Unknown: Exemplary gene or splice site sequence"
cagguaagcu

SEQ ID NO: 4323 - RNA, 10 nt, Unknown
  source: /note="Description of Unknown: Exemplary gene or splice site sequence"
agggucagaa

SEQ ID NO: 4324 - RNA, 10 nt, Unknown
  source: /note="Description of Unknown: Exemplary gene or splice site sequence"
cacguauguc

SEQ ID NO: 4325 - RNA, 10 nt, Unknown
  source: /note="Description of Unknown: Exemplary gene or splice site sequence"
gggguacgga

SEQ ID NO: 4326 - RNA, 10 nt, Unknown
  source: /note="Description of Unknown: Exemplary gene or splice site sequence"
aaggcaggac

SEQ ID NO: 4327 - RNA, 10 nt, Unknown
  source: /note="Description of Unknown: Exemplary gene or splice site sequence"
gaggugaagc

SEQ ID NO: 4328 - RNA, 10 nt, Unknown
  source: /note="Description of Unknown: Exemplary gene or splice site sequence"
gagguuugaa

SEQ ID NO: 4329 - RNA, 10 nt, Unknown
  source: /note="Description of Unknown: Exemplary gene or splice site sequence"
gaggcaggug

SEQ ID NO: 4330 - RNA, 10 nt, Unknown
  source: /note="Description of Unknown: Exemplary gene or splice site sequence"
gagguucgga

SEQ ID NO: 4331 - RNA, 10 nt, Unknown
  source: /note="Description of Unknown: Exemplary gene or splice site sequence"
caggugauac

SEQ ID NO: 4332 - RNA, 10 nt, Unknown
  source: /note="Description of Unknown: Exemplary gene or splice site sequence"
aggguggggg

SEQ ID NO: 4333 - RNA, 10 nt, Unknown
  source: /note="Description of Unknown: Exemplary gene or splice site sequence"
ugggugaaca

SEQ ID NO: 4334 - RNA, 10 nt, Unknown
  source: /note="Description of Unknown: Exemplary gene or splice site sequence"
uagguacugc

SEQ ID NO: 4335 - RNA, 10 nt, Unknown
  source: /note="Description of Unknown: Exemplary gene or splice site sequence"
caggcuccug

SEQ ID NO: 4336 - RNA, 10 nt, Unknown
  source: /note="Description of Unknown: Exemplary gene or splice site sequence"
gagguacauc

SEQ ID NO: 4337 - RNA, 10 nt, Unknown
  source: /note="Description of Unknown: Exemplary gene or splice site sequence"
cuaguaggug

SEQ ID NO: 4338 - RNA, 10 nt, Unknown
  source: /note="Description of Unknown: Exemplary gene or splice site sequence"
gaggcaagga

SEQ ID NO: 4339 - RNA, 10 nt, Unknown
  source: /note="Description of Unknown: Exemplary gene or splice site sequence"
aaggcaagac

SEQ ID NO: 4340 - RNA, 10 nt, Unknown
  source: /note="Description of Unknown: Exemplary gene or splice site sequence"
aaagugcggu

SEQ ID NO: 4341 - RNA, 10 nt, Unknown
  source: /note="Description of Unknown: Exemplary gene or splice site sequence"
gagguuaaug

SEQ ID NO: 4342 - RNA, 10 nt, Unknown
  source: /note="Description of Unknown: Exemplary gene or splice site sequence"
gcaguaagca

SEQ ID NO: 4343 - RNA, 10 nt, Unknown
  source: /note="Description of Unknown: Exemplary gene or splice site sequence"
aaggcaagca

SEQ ID NO: 4344 - RNA, 10 nt, Unknown
  source: /note="Description of Unknown: Exemplary gene or splice site sequence"
acaguaagcu

SEQ ID NO: 4345 - RNA, 10 nt, Unknown
  source: /note="Description of Unknown: Exemplary gene or splice site sequence"
aaaguacgua

SEQ ID NO: 4346 - RNA, 10 nt, Unknown
  source: /note="Description of Unknown: Exemplary gene or splice site sequence"
cugguuaguc

SEQ ID NO: 4347 - RNA, 10 nt, Unknown
  source: /note="Description of Unknown: Exemplary gene or splice site sequence"
gaggugacgc

SEQ ID NO: 4348 - RNA, 10 nt, Unknown
  source: /note="Description of Unknown: Exemplary gene or splice site sequence"
acaguaagga

SEQ ID NO: 4349 - RNA, 10 nt, Unknown
  source: /note="Description of Unknown: Exemplary gene or splice site sequence"
aauguacuua

SEQ ID NO: 4350 - RNA, 10 nt, Unknown
  source: /note="Description of Unknown: Exemplary gene or splice site sequence"
gggguacagu

SEQ ID NO: 4351 - RNA, 10 nt, Unknown
  source: /note="Description of Unknown: Exemplary gene or splice site sequence"
cguguaugug

SEQ ID NO: 4352 - RNA, 10 nt, Unknown
  source: /note="Description of Unknown: Exemplary gene or splice site sequence"
uccguagguu

SEQ ID NO: 4353 - RNA, 10 nt, Unknown
  source: /note="Description of Unknown: Exemplary gene or splice site sequence"
gagguggucg

SEQ ID NO: 4354 - RNA, 10 nt, Unknown
  source: /note="Description of Unknown: Exemplary gene or splice site sequence"
ucagugaguc

SEQ ID NO: 4355 - RNA, 10 nt, Unknown
  source: /note="Description of Unknown: Exemplary gene or splice site sequence"
gagguaauua

SEQ ID NO: 4356 - RNA, 10 nt, Unknown
  source: /note="Description of Unknown: Exemplary gene or splice site sequence"
ucugugagca

SEQ ID NO: 4357 - RNA, 10 nt, Unknown
  source: /note="Description of Unknown: Exemplary gene or splice site sequence"
gaaguucgug

SEQ ID NO: 4358 - RNA, 10 nt, Unknown
  source: /note="Description of Unknown: Exemplary gene or splice site sequence"
acggugaggc

SEQ ID NO: 4359 - RNA, 10 nt, Unknown
  source: /note="Description of Unknown: Exemplary gene or splice site sequence"
uagguaguug

SEQ ID NO: 4360 - RNA, 10 nt, Unknown
  source: /note="Description of Unknown: Exemplary gene or splice site sequence"
ggugucuggg

SEQ ID NO: 4361 - RNA, 10 nt, Unknown
  source: /note="Description of Unknown: Exemplary gene or splice site sequence"
ugugugaguu

SEQ ID NO: 4362 - RNA, 10 nt, Unknown
  source: /note="Description of Unknown: Exemplary gene or splice site sequence"
aauguaggag

SEQ ID NO: 4363 - RNA, 10 nt, Unknown
  source: /note="Description of Unknown: Exemplary gene or splice site sequence"
gaggcacguc

SEQ ID NO: 4364 - RNA, 10 nt, Unknown
  source: /note="Description of Unknown: Exemplary gene or splice site sequence"
caaguacauu

SEQ ID NO: 4365 - RNA, 10 nt, Unknown
  source: /note="Description of Unknown: Exemplary gene or splice site sequence"
uugguacaga

SEQ ID NO: 4366 - RNA, 10 nt, Unknown
  source: /note="Description of Unknown: Exemplary gene or splice site sequence"
uuggucagug

SEQ ID NO: 4367 - RNA, 10 nt, Unknown
  source: /note="Description of Unknown: Exemplary gene or splice site sequence"
ggugugggcc

SEQ ID NO: 4368 - RNA, 10 nt, Unknown
  source: /note="Description of Unknown: Exemplary gene or splice site sequence"
cgggugagcu

SEQ ID NO: 4369 - RNA, 10 nt, Unknown
  source: /note="Description of Unknown: Exemplary gene or splice site sequence"
acagugagag

SEQ ID NO: 4370 - RNA, 10 nt, Unknown
  source: /note="Description of Unknown: Exemplary gene or splice site sequence"
auaguagguu

SEQ ID NO: 4371 - RNA, 10 nt, Unknown
  source: /note="Description of Unknown: Exemplary gene or splice site sequence"
cagguccgug

SEQ ID NO: 4372 - RNA, 10 nt, Unknown
  source: /note="Description of Unknown: Exemplary gene or splice site sequence"
gaggcaggua

SEQ ID NO: 4373 - RNA, 10 nt, Unknown
  source: /note="Description of Unknown: Exemplary gene or splice site sequence"
augguggaag

SEQ ID NO: 4374 - RNA, 10 nt, Unknown
  source: /note="Description of Unknown: Exemplary gene or splice site sequence"
auggugggcg

SEQ ID NO: 4375 - RNA, 10 nt, Unknown
  source: /note="Description of Unknown: Exemplary gene or splice site sequence"
caaguaagca

SEQ ID NO: 4376 - RNA, 10 nt, Unknown
  source: /note="Description of Unknown: Exemplary gene or splice site sequence"
cccgugggua

SEQ ID NO: 4377 - RNA, 10 nt, Unknown
  source: /note="Description of Unknown: Exemplary gene or splice site sequence"
cagguagaau

SEQ ID NO: 4378 - RNA, 10 nt, Unknown
  source: /note="Description of Unknown: Exemplary gene or splice site sequence"
caggcugagc

SEQ ID NO: 4379 - RNA, 10 nt, Unknown
  source: /note="Description of Unknown: Exemplary gene or splice site sequence"
cugguggccc

SEQ ID NO: 4380 - RNA, 10 nt, Unknown
  source: /note="Description of Unknown: Exemplary gene or splice site sequence"
ugaguaagag

SEQ ID NO: 4381 - RNA, 10 nt, Unknown
  source: /note="Description of Unknown: Exemplary gene or splice site sequence"
cacguuagcu

SEQ ID NO: 4382 - RNA, 10 nt, Unknown
  source: /note="Description of Unknown: Exemplary gene or splice site sequence"
aagguagcuc

SEQ ID NO: 4383 - RNA, 10 nt, Unknown
  source: /note="Description of Unknown: Exemplary gene or splice site sequence"
ucggugaguu

SEQ ID NO: 4384 - RNA, 10 nt, Unknown
  source: /note="Description of Unknown: Exemplary gene or splice site sequence"
gaggcccuuc

SEQ ID NO: 4385 - RNA, 10 nt, Unknown
  source: /note="Description of Unknown: Exemplary gene or splice site sequence"
cagguuaugc

SEQ ID NO: 4386 - RNA, 10 nt, Unknown
  source: /note="Description of Unknown: Exemplary gene or splice site sequence"
ccuguaagcu

SEQ ID NO: 4387 - RNA, 10 nt, Unknown
  source: /note="Description of Unknown: Exemplary gene or splice site sequence"
caggucuccu

SEQ ID NO: 4388 - RNA, 10 nt, Unknown
  source: /note="Description of Unknown: Exemplary gene or splice site sequence"
uagguaggcu

SEQ ID NO: 4389 - RNA, 10 nt, Unknown
  source: /note="Description of Unknown: Exemplary gene or splice site sequence"
gggguagggg

SEQ ID NO: 4390 - RNA, 10 nt, Unknown
  source: /note="Description of Unknown: Exemplary gene or splice site sequence"
aagguaguga

SEQ ID NO: 4391 - RNA, 10 nt, Unknown
  source: /note="Description of Unknown: Exemplary gene or splice site sequence"
gagguuguug

SEQ ID NO: 4392 - RNA, 10 nt, Unknown
  source: /note="Description of Unknown: Exemplary gene or splice site sequence"
ugggugugau

SEQ ID NO: 4393 - RNA, 10 nt, Unknown
  source: /note="Description of Unknown: Exemplary gene or splice site sequence"
cccguaacua

SEQ ID NO: 4394 - RNA, 10 nt, Unknown
  source: /note="Description of Unknown: Exemplary gene or splice site sequence"
aaagcuggug

SEQ ID NO: 4395 - RNA, 10 nt, Unknown
  source: /note="Description of Unknown: Exemplary gene or splice site sequence"
gagguauagu

SEQ ID NO: 4396 - RNA, 10 nt, Unknown
  source: /note="Description of Unknown: Exemplary gene or splice site sequence"
acgguaagag

SEQ ID NO: 4397 - RNA, 10 nt, Unknown
  source: /note="Description of Unknown: Exemplary gene or splice site sequence"
gaggccaguu

SEQ ID NO: 4398 - RNA, 10 nt, Unknown
  source: /note="Description of Unknown: Exemplary gene or splice site sequence"
ucggugggag

SEQ ID NO: 4399 - RNA, 10 nt, Unknown
  source: /note="Description of Unknown: Exemplary gene or splice site sequence"
ccaguguggc

SEQ ID NO: 4400 - RNA, 10 nt, Unknown
  source: /note="Description of Unknown: Exemplary gene or splice site sequence"
ucuguagguc

SEQ ID NO: 4401 - RNA, 10 nt, Unknown
  source: /note="Description of Unknown: Exemplary gene or splice site sequence"
aaggucaauu

SEQ ID NO: 4402 - RNA, 10 nt, Unknown
  source: /note="Description of Unknown: Exemplary gene or splice site sequence"
gucguaagaa

SEQ ID NO: 4403 - RNA, 10 nt, Unknown
  source: /note="Description of Unknown: Exemplary gene or splice site sequence"
gcgguaaguc

SEQ ID NO: 4404 - RNA, 10 nt, Unknown
  source: /note="Description of Unknown: Exemplary gene or splice site sequence"
cugguagagc

SEQ ID NO: 4405 - RNA, 10 nt, Unknown
  source: /note="Description of Unknown: Exemplary gene or splice site sequence"
gaggucgguc

SEQ ID NO: 4406 - RNA, 10 nt, Unknown
  source: /note="Description of Unknown: Exemplary gene or splice site sequence"
caggucgucu

SEQ ID NO: 4407 - RNA, 10 nt, Unknown
  source: /note="Description of Unknown: Exemplary gene or splice site sequence"
gggguagggc

SEQ ID NO: 4408 - RNA, 10 nt, Unknown
  source: /note="Description of Unknown: Exemplary gene or splice site sequence"
cuugucagcu

SEQ ID NO: 4409 - RNA, 10 nt, Unknown
  source: /note="Description of Unknown: Exemplary gene or splice site sequence"
cugguauuac

SEQ ID NO: 4410 - RNA, 10 nt, Unknown
  source: /note="Description of Unknown: Exemplary gene or splice site sequence"
uaaguacguc

SEQ ID NO: 4411 - RNA, 10 nt, Unknown
  source: /note="Description of Unknown: Exemplary gene or splice site sequence"
acggugaaag

SEQ ID NO: 4412 - RNA, 10 nt, Unknown
  source: /note="Description of Unknown: Exemplary gene or splice site sequence"
ccagccaaua

SEQ ID NO: 4413 - RNA, 10 nt, Unknown
  source: /note="Description of Unknown: Exemplary gene or splice site sequence"
cagguuuguc

SEQ ID NO: 4414 - RNA, 10 nt, Unknown
  source: /note="Description of Unknown: Exemplary gene or splice site sequence"
aaggucuuag

SEQ ID NO: 4415 - RNA, 10 nt, Unknown
  source: /note="Description of Unknown: Exemplary gene or splice site sequence"
aagguuaggg

SEQ ID NO: 4416 - RNA, 10 nt, Unknown
  source: /note="Description of Unknown: Exemplary gene or splice site sequence"
cggguaaauu

SEQ ID NO: 4417 - RNA, 10 nt, Unknown
  source: /note="Description of Unknown: Exemplary gene or splice site sequence"
cagguaacgg

SEQ ID NO: 4418 - RNA, 10 nt, Unknown
  source: /note="Description of Unknown: Exemplary gene or splice site sequence"
agagugugua

SEQ ID NO: 4419 - RNA, 10 nt, Unknown
  source: /note="Description of Unknown: Exemplary gene or splice site sequence"
gauguaauuu

SEQ ID NO: 4420 - RNA, 10 nt, Unknown
  source: /note="Description of Unknown: Exemplary gene or splice site sequence"
aaagugagga

SEQ ID NO: 4421 - RNA, 10 nt, Unknown
  source: /note="Description of Unknown: Exemplary gene or splice site sequence"
ggaguaaaua

SEQ ID NO: 4422 - RNA, 10 nt, Unknown
  source: /note="Description of Unknown: Exemplary gene or splice site sequence"
gugguaccca

SEQ ID NO: 4423 - RNA, 10 nt, Unknown
  source: /note="Description of Unknown: Exemplary gene or splice site sequence"
cagguauugc

SEQ ID NO: 4424 - RNA, 10 nt, Unknown
  source: /note="Description of Unknown: Exemplary gene or splice site sequence"
gaugugaggg

SEQ ID NO: 4425 - RNA, 10 nt, Unknown
  source: /note="Description of Unknown: Exemplary gene or splice site sequence"
aagguaacag

SEQ ID NO: 4426 - RNA, 10 nt, Unknown
  source: /note="Description of Unknown: Exemplary gene or splice site sequence"
uugguaaaag

SEQ ID NO: 4427 - RNA, 10 nt, Unknown
  source: /note="Description of Unknown: Exemplary gene or splice site sequence"
acggugagac

SEQ ID NO: 4428 - RNA, 10 nt, Unknown
  source: /note="Description of Unknown: Exemplary gene or splice site sequence"
cugguaugac

SEQ ID NO: 4429 - RNA, 10 nt, Unknown
  source: /note="Description of Unknown: Exemplary gene or splice site sequence"
cagguucacu

SEQ ID NO: 4430 - RNA, 10 nt, Unknown
  source: /note="Description of Unknown: Exemplary gene or splice site sequence"
gaggugauca

SEQ ID NO: 4431 - RNA, 10 nt, Unknown
  source: /note="Description of Unknown: Exemplary gene or splice site sequence"
aguguaaguc

SEQ ID NO: 4432 - RNA, 10 nt, Unknown
  source: /note="Description of Unknown: Exemplary gene or splice site sequence"
aacguaagua

SEQ ID NO: 4433 - RNA, 10 nt, Unknown
  source: /note="Description of Unknown: Exemplary gene or splice site sequence"
gagguacagg

SEQ ID NO: 4434 - RNA, 10 nt, Unknown
  source: /note="Description of Unknown: Exemplary gene or splice site sequence"
caaguaauga

SEQ ID NO: 4435 - RNA, 10 nt, Unknown
  source: /note="Description of Unknown: Exemplary gene or splice site sequence"
gauguaagga

SEQ ID NO: 4436 - RNA, 10 nt, Unknown
  source: /note="Description of Unknown: Exemplary gene or splice site sequence"
ucaguucccc

SEQ ID NO: 4437 - RNA, 10 nt, Unknown
  source: /note="Description of Unknown: Exemplary gene or splice site sequence"
gcgguaagga

SEQ ID NO: 4438 - RNA, 10 nt, Unknown
  source: /note="Description of Unknown: Exemplary gene or splice site sequence"
uagguacuaa

SEQ ID NO: 4439 - RNA, 10 nt, Unknown
  source: /note="Description of Unknown: Exemplary gene or splice site sequence"
acuguaagug

SEQ ID NO: 4440 - RNA, 10 nt, Unknown
  source: /note="Description of Unknown: Exemplary gene or splice site sequence"
aaggugugcu

SEQ ID NO: 4441 - RNA, 10 nt, Unknown
  source: /note="Description of Unknown: Exemplary gene or splice site sequence"
aaggugguga

SEQ ID NO: 4442 - RNA, 10 nt, Unknown
  source: /note="Description of Unknown: Exemplary gene or splice site sequence"
acggugcgcc

SEQ ID NO: 4443 - RNA, 10 nt, Unknown
  source: /note="Description of Unknown: Exemplary gene or splice site sequence"
aagguauugc

SEQ ID NO: 4444 - RNA, 10 nt, Unknown
  source: /note="Description of Unknown: Exemplary gene or splice site sequence"
aacgugaaua

SEQ ID NO: 4445 - RNA, 10 nt, Unknown
  source: /note="Description of Unknown: Exemplary gene or splice site sequence"
uagguaugau

SEQ ID NO: 4446 - RNA, 10 nt, Unknown
  source: /note="Description of Unknown: Exemplary gene or splice site sequence"
gggguugguc

SEQ ID NO: 4447 - RNA, 10 nt, Unknown
  source: /note="Description of Unknown: Exemplary gene or splice site sequence"
uaagugaggc

SEQ ID NO: 4448 - RNA, 10 nt, Unknown
  source: /note="Description of Unknown: Exemplary gene or splice site sequence"
caagugaucg

SEQ ID NO: 4449 - RNA, 10 nt, Unknown
  source: /note="Description of Unknown: Exemplary gene or splice site sequence"
aaaguacggg

SEQ ID NO: 4450 - RNA, 10 nt, Unknown
  source: /note="Description of Unknown: Exemplary gene or splice site sequence"
agagcuacag

SEQ ID NO: 4451 - RNA, 10 nt, Unknown
  source: /note="Description of Unknown: Exemplary gene or splice site sequence"
uggguacagc

SEQ ID NO: 4452 - RNA, 10 nt, Unknown
  source: /note="Description of Unknown: Exemplary gene or splice site sequence"
aaggcaagaa

SEQ ID NO: 4453 - RNA, 10 nt, Unknown
  source: /note="Description of Unknown: Exemplary gene or splice site sequence"
gagguaaaca

SEQ ID NO: 4454 - RNA, 10 nt, Unknown
  source: /note="Description of Unknown: Exemplary gene or splice site sequence"
aagguaguca

SEQ ID NO: 4455 - RNA, 10 nt, Unknown
  source: /note="Description of Unknown: Exemplary gene or splice site sequence"
cugguauguc

SEQ ID NO: 4456 - RNA, 10 nt, Unknown
  source: /note="Description of Unknown: Exemplary gene or splice site sequence"
cugguacuga

SEQ ID NO: 4457 - RNA, 10 nt, Unknown
  source: /note="Description of Unknown: Exemplary gene or splice site sequence"
cagguucgug

SEQ ID NO: 4458 - RNA, 10 nt, Unknown
  source: /note="Description of Unknown: Exemplary gene or splice site sequence"
aagguauggu

SEQ ID NO: 4459 - RNA, 10 nt, Unknown
  source: /note="Description of Unknown: Exemplary gene or splice site sequence"
uguguaggug

SEQ ID NO: 4460 - RNA, 10 nt, Unknown
  source: /note="Description of Unknown: Exemplary gene or splice site sequence"
cugguaauau

SEQ ID NO: 4461 - RNA, 10 nt, Unknown
  source: /note="Description of Unknown: Exemplary gene or splice site sequence"
cuagugagaa

SEQ ID NO: 4462 - RNA, 10 nt, Unknown
  source: /note="Description of Unknown: Exemplary gene or splice site sequence"
ucgguaagug

SEQ ID NO: 4463 - RNA, 10 nt, Unknown
  source: /note="Description of Unknown: Exemplary gene or splice site sequence"
gcgguagggc

SEQ ID NO: 4464 - RNA, 10 nt, Unknown
  source: /note="Description of Unknown: Exemplary gene or splice site sequence"
gagguaaucc

SEQ ID NO: 4465 - RNA, 10 nt, Unknown
  source: /note="Description of Unknown: Exemplary gene or splice site sequence"
auuguaauaa

SEQ ID NO: 4466 - RNA, 10 nt, Unknown
  source: /note="Description of Unknown: Exemplary gene or splice site sequence"
aagguuuaaa

SEQ ID NO: 4467 - RNA, 10 nt, Unknown
  source: /note="Description of Unknown: Exemplary gene or splice site sequence"
ccuguacugu

SEQ ID NO: 4468 - RNA, 10 nt, Unknown
  source: /note="Description of Unknown: Exemplary gene or splice site sequence"
gcggugagcg

SEQ ID NO: 4469 - RNA, 10 nt, Unknown
  source: /note="Description of Unknown: Exemplary gene or splice site sequence"
cagguaggcu

SEQ ID NO: 4470 - RNA, 10 nt, Unknown
  source: /note="Description of Unknown: Exemplary gene or splice site sequence"
uagguugguc

SEQ ID NO: 4471 - RNA, 10 nt, Unknown
  source: /note="Description of Unknown: Exemplary gene or splice site sequence"
cagguugccu

SEQ ID NO: 4472 - RNA, 10 nt, Unknown
  source: /note="Description of Unknown: Exemplary gene or splice site sequence"
gguguggacg

SEQ ID NO: 4473 - RNA, 10 nt, Unknown
  source: /note="Description of Unknown: Exemplary gene or splice site sequence"
gauguggcau

SEQ ID NO: 4474 - RNA, 10 nt, Unknown
  source: /note="Description of Unknown: Exemplary gene or splice site sequence"
ucgguaaggu

SEQ ID NO: 4475 - RNA, 10 nt, Unknown
  source: /note="Description of Unknown: Exemplary gene or splice site sequence"
gaggugcguc

SEQ ID NO: 4476 - RNA, 10 nt, Unknown
  source: /note="Description of Unknown: Exemplary gene or splice site sequence"
cgggugaguc

SEQ ID NO: 4477 - RNA, 10 nt, Unknown
  source: /note="Description of Unknown: Exemplary gene or splice site sequence"
gagguucuug

SEQ ID NO: 4478 - RNA, 10 nt, Unknown
  source: /note="Description of Unknown: Exemplary gene or splice site sequence"
aaggugcuug

SEQ ID NO: 4479 - RNA, 10 nt, Unknown
  source: /note="Description of Unknown: Exemplary gene or splice site sequence"
auggucagca

SEQ ID NO: 4480 - RNA, 10 nt, Unknown
  source: /note="Description of Unknown: Exemplary gene or splice site sequence"
cggguacuca

SEQ ID NO: 4481 - RNA, 10 nt, Unknown
  source: /note="Description of Unknown: Exemplary gene or splice site sequence"
aaaguuaauc

SEQ ID NO: 4482 - RNA, 10 nt, Unknown
  source: /note="Description of Unknown: Exemplary gene or splice site sequence"
agcgugagcg

SEQ ID NO: 4483 - RNA, 10 nt, Unknown
  source: /note="Description of Unknown: Exemplary gene or splice site sequence"
ccggcuggug

SEQ ID NO: 4484 - RNA, 10 nt, Unknown
  source: /note="Description of Unknown: Exemplary gene or splice site sequence"
aguguaauuu

SEQ ID NO: 4485 - RNA, 10 nt, Unknown
  source: /note="Description of Unknown: Exemplary gene or splice site sequence"
ugagccacuc

SEQ ID NO: 4486 - RNA, 10 nt, Unknown
  source: /note="Description of Unknown: Exemplary gene or splice site sequence"
ggggucugua

SEQ ID NO: 4487 - RNA, 10 nt, Unknown
  source: /note="Description of Unknown: Exemplary gene or splice site sequence"
auggcauguc

SEQ ID NO: 4488 - RNA, 10 nt, Unknown
  source: /note="Description of Unknown: Exemplary gene or splice site sequence"
cggguaaaga

SEQ ID NO: 4489 - RNA, 10 nt, Unknown
  source: /note="Description of Unknown: Exemplary gene or splice site sequence"
aggguagcau

SEQ ID NO: 4490 - RNA, 10 nt, Unknown
  source: /note="Description of Unknown: Exemplary gene or splice site sequence"
gagguucgug

SEQ ID NO: 4491 - RNA, 10 nt, Unknown
  source: /note="Description of Unknown: Exemplary gene or splice site sequence"
uaaguuauuc

SEQ ID NO: 4492 - RNA, 10 nt, Unknown
  source: /note="Description of Unknown: Exemplary gene or splice site sequence"
caggugguau

SEQ ID NO: 4493 - RNA, 10 nt, Unknown
  source: /note="Description of Unknown: Exemplary gene or splice site sequence"
caggugaagu

SEQ ID NO: 4494 - RNA, 10 nt, Unknown
  source: /note="Description of Unknown: Exemplary gene or splice site sequence"
guaguaauua

SEQ ID NO: 4495 - RNA, 10 nt, Unknown
  source: /note="Description of Unknown: Exemplary gene or splice site sequence"
augguuggug

SEQ ID NO: 4496 - RNA, 10 nt, Unknown
  source: /note="Description of Unknown: Exemplary gene or splice site sequence"
aaggugccuu

SEQ ID NO: 4497 - RNA, 10 nt, Unknown
  source: /note="Description of Unknown: Exemplary gene or splice site sequence"
uccgugaguu

SEQ ID NO: 4498 - RNA, 10 nt, Unknown
  source: /note="Description of Unknown: Exemplary gene or splice site sequence"
aaagcaggua

SEQ ID NO: 4499 - RNA, 10 nt, Unknown
  source: /note="Description of Unknown: Exemplary gene or splice site sequence"
cagguggagg

SEQ ID NO: 4500 - RNA, 10 nt, Unknown
  source: /note="Description of Unknown: Exemplary gene or splice site sequence"
cagguuagac

SEQ ID NO: 4501 - RNA, 10 nt, Unknown
  source: /note="Description of Unknown: Exemplary gene or splice site sequence"
aagguguugu

SEQ ID NO: 4502 - RNA, 10 nt, Unknown
  source: /note="Description of Unknown: Exemplary gene or splice site sequence"
gaggucugug

SEQ ID NO: 4503 - RNA, 10 nt, Unknown
  source: /note="Description of Unknown: Exemplary gene or splice site sequence"
cugguaauua

SEQ ID NO: 4504 - RNA, 10 nt, Unknown
  source: /note="Description of Unknown: Exemplary gene or splice site sequence"
cagguaggcg

SEQ ID NO: 4505 - RNA, 10 nt, Unknown
  source: /note="Description of Unknown: Exemplary gene or splice site sequence"
aauguaggua

SEQ ID NO: 4506 - RNA, 10 nt, Unknown
  source: /note="Description of Unknown: Exemplary gene or splice site sequence"
uagguuagca

SEQ ID NO: 4507 - RNA, 10 nt, Unknown
  source: /note="Description of Unknown: Exemplary gene or splice site sequence"
gagguauugc

SEQ ID NO: 4508 - RNA, 10 nt, Unknown
  source: /note="Description of Unknown: Exemplary gene or splice site sequence"
auuguacaca

SEQ ID NO: 4509 - RNA, 10 nt, Unknown
  source: /note="Description of Unknown: Exemplary gene or splice site sequence"
gaaguaggua

SEQ ID NO: 4510 - RNA, 10 nt, Unknown
  source: /note="Description of Unknown: Exemplary gene or splice site sequence"
ggugugaguu

SEQ ID NO: 4511 - RNA, 10 nt, Unknown
  source: /note="Description of Unknown: Exemplary gene or splice site sequence"
aacgugaguu

SEQ ID NO: 4512 - RNA, 10 nt, Unknown
  source: /note="Description of Unknown: Exemplary gene or splice site sequence"
gagguaaccg

SEQ ID NO: 4513 - RNA, 10 nt, Unknown
  source: /note="Description of Unknown: Exemplary gene or splice site sequence"
auuguaagaa

SEQ ID NO: 4514 - RNA, 10 nt, Unknown
  source: /note="Description of Unknown: Exemplary gene or splice site sequence"
ccaguaucgu

SEQ ID NO: 4515 - RNA, 10 nt, Unknown
  source: /note="Description of Unknown: Exemplary gene or splice site sequence"
ccggugggug

SEQ ID NO: 4516 - RNA, 10 nt, Unknown
  source: /note="Description of Unknown: Exemplary gene or splice site sequence"
gagguagugu

SEQ ID NO: 4517 - RNA, 10 nt, Unknown
  source: /note="Description of Unknown: Exemplary gene or splice site sequence"
acggugggaa

SEQ ID NO: 4518 - RNA, 10 nt, Unknown
  source: /note="Description of Unknown: Exemplary gene or splice site sequence"
cacguaugua

SEQ ID NO: 4519 - RNA, 10 nt, Unknown
  source: /note="Description of Unknown: Exemplary gene or splice site sequence"
gcgguaugac

SEQ ID NO: 4520 - RNA, 10 nt, Unknown
  source: /note="Description of Unknown: Exemplary gene or splice site sequence"
ccgguauuuu

SEQ ID NO: 4521 - RNA, 10 nt, Unknown
  source: /note="Description of Unknown: Exemplary gene or splice site sequence"
gagguagaac

SEQ ID NO: 4522 - RNA, 10 nt, Unknown
  source: /note="Description of Unknown: Exemplary gene or splice site sequence"
caggcgcgug

SEQ ID NO: 4523 - RNA, 10 nt, Unknown
  source: /note="Description of Unknown: Exemplary gene or splice site sequence"
aagguucuac

SEQ ID NO: 4524 - RNA, 10 nt, Unknown
  source: /note="Description of Unknown: Exemplary gene or splice site sequence"
gagguagcag

SEQ ID NO: 4525 - RNA, 10 nt, Unknown
  source: /note="Description of Unknown: Exemplary gene or splice site sequence"
uaagugcugu

SEQ ID NO: 4526 - RNA, 10 nt, Unknown
  source: /note="Description of Unknown: Exemplary gene or splice site sequence"
cucguaaggu

SEQ ID NO: 4527 - RNA, 10 nt, Unknown
  source: /note="Description of Unknown: Exemplary gene or splice site sequence"
caggucagcu

SEQ ID NO: 4528 - RNA, 10 nt, Unknown
  source: /note="Description of Unknown: Exemplary gene or splice site sequence"
agggugcagg

SEQ ID NO: 4529 - RNA, 10 nt, Unknown
  source: /note="Description of Unknown: Exemplary gene or splice site sequence"
gaggugaaac

SEQ ID NO: 4530 - RNA, 10 nt, Unknown
  source: /note="Description of Unknown: Exemplary gene or splice site sequence"
aauguaugcc

SEQ ID NO: 4531 - RNA, 10 nt, Unknown
  source: /note="Description of Unknown: Exemplary gene or splice site sequence"
ucugcucaau

SEQ ID NO: 4532 - RNA, 10 nt, Unknown
  source: /note="Description of Unknown: Exemplary gene or splice site sequence"
acgguaaugu

SEQ ID NO: 4533 - RNA, 10 nt, Unknown
  source: /note="Description of Unknown: Exemplary gene or splice site sequence"
aagguaguug

SEQ ID NO: 4534 - RNA, 10 nt, Unknown
  source: /note="Description of Unknown: Exemplary gene or splice site sequence"
caggugauga

SEQ ID NO: 4535 - RNA, 10 nt, Unknown
  source: /note="Description of Unknown: Exemplary gene or splice site sequence"
gagguaacac

SEQ ID NO: 4536 - RNA, 10 nt, Unknown
  source: /note="Description of Unknown: Exemplary gene or splice site sequence"
agggugugac

SEQ ID NO: 4537 - RNA, 10 nt, Unknown
  source: /note="Description of Unknown: Exemplary gene or splice site sequence"
gaggcaauaa

SEQ ID NO: 4538 - RNA, 10 nt, Unknown
  source: /note="Description of Unknown: Exemplary gene or splice site sequence"
gugguaaagc

SEQ ID NO: 4539 - RNA, 10 nt, Unknown
  source: /note="Description of Unknown: Exemplary gene or splice site sequence"
cuggugggcg

SEQ ID NO: 4540 - RNA, 10 nt, Unknown
  source: /note="Description of Unknown: Exemplary gene or splice site sequence"
ucggucagca

SEQ ID NO: 4541 - RNA, 10 nt, Unknown
  source: /note="Description of Unknown: Exemplary gene or splice site sequence"
auggugauua

SEQ ID NO: 4542 - RNA, 10 nt, Unknown
  source: /note="Description of Unknown: Exemplary gene or splice site sequence"
cgagugugua

SEQ ID NO: 4543 - RNA, 10 nt, Unknown
  source: /note="Description of Unknown: Exemplary gene or splice site sequence"
agcgcaagua

SEQ ID NO: 4544 - RNA, 10 nt, Unknown
  source: /note="Description of Unknown: Exemplary gene or splice site sequence"
uggguacguu

SEQ ID NO: 4545 - RNA, 10 nt, Unknown
  source: /note="Description of Unknown: Exemplary gene or splice site sequence"
aguguacaua

SEQ ID NO: 4546 - RNA, 10 nt, Unknown
  source: /note="Description of Unknown: Exemplary gene or splice site sequence"
acaguagguu

SEQ ID NO: 4547 - RNA, 10 nt, Unknown
  source: /note="Description of Unknown: Exemplary gene or splice site sequence"
uuggugaagu

SEQ ID NO: 4548 - RNA, 10 nt, Unknown
  source: /note="Description of Unknown: Exemplary gene or splice site sequence"
uggguaagga

SEQ ID NO: 4549 - RNA, 10 nt, Unknown
  source: /note="Description of Unknown: Exemplary gene or splice site sequence"
uaggugccuu

SEQ ID NO: 4550 - RNA, 10 nt, Unknown
  source: /note="Description of Unknown: Exemplary gene or splice site sequence"
ccugugggug

SEQ ID NO: 4551 - RNA, 10 nt, Unknown
  source: /note="Description of Unknown: Exemplary gene or splice site sequence"
uccguaaguu

SEQ ID NO: 4552 - RNA, 10 nt, Unknown
  source: /note="Description of Unknown: Exemplary gene or splice site sequence"
gugguaaacg

SEQ ID NO: 4553 - RNA, 10 nt, Unknown
  source: /note="Description of Unknown: Exemplary gene or splice site sequence"
cgggugcggu

SEQ ID NO: 4554 - RNA, 10 nt, Unknown
  source: /note="Description of Unknown: Exemplary gene or splice site sequence"
cauguacuuc

SEQ ID NO: 4555 - RNA, 10 nt, Unknown
  source: /note="Description of Unknown: Exemplary gene or splice site sequence"
agaguaaagg

SEQ ID NO: 4556 - RNA, 10 nt, Unknown
  source: /note="Description of Unknown: Exemplary gene or splice site sequence"
cgcgugagua

SEQ ID NO: 4557 - RNA, 10 nt, Unknown
  source: /note="Description of Unknown: Exemplary gene or splice site sequence"
agagugggca

SEQ ID NO: 4558 - RNA, 10 nt, Unknown
  source: /note="Description of Unknown: Exemplary gene or splice site sequence"
agaguaagcc

SEQ ID NO: 4559 - RNA, 10 nt, Unknown
  source: /note="Description of Unknown: Exemplary gene or splice site sequence"
agaguaaaca

SEQ ID NO: 4560 - RNA, 10 nt, Unknown
  source: /note="Description of Unknown: Exemplary gene or splice site sequence"
gugguuauga

SEQ ID NO: 4561 - RNA, 10 nt, Unknown
  source: /note="Description of Unknown: Exemplary gene or splice site sequence"
aggguaauaa

SEQ ID NO: 4562 - RNA, 10 nt, Unknown
  source: /note="Description of Unknown: Exemplary gene or splice site sequence"
ugaguaagac

SEQ ID NO: 4563 - RNA, 10 nt, Unknown
  source: /note="Description of Unknown: Exemplary gene or splice site sequence"
agaguuuguu

SEQ ID NO: 4564 - RNA, 10 nt, Unknown
  source: /note="Description of Unknown: Exemplary gene or splice site sequence"
cgggucugca

SEQ ID NO: 4565 - RNA, 10 nt, Unknown
  source: /note="Description of Unknown: Exemplary gene or splice site sequence"
cagguaaguc

SEQ ID NO: 4566 - RNA, 10 nt, Unknown
  source: /note="Description of Unknown: Exemplary gene or splice site sequence"
aagguagaau

SEQ ID NO: 4567 - RNA, 10 nt, Unknown
  source: /note="Description of Unknown: Exemplary gene or splice site sequence"
caggucccuc

SEQ ID NO: 4568 - RNA, 10 nt, Unknown
  source: /note="Description of Unknown: Exemplary gene or splice site sequence"
agaguaaugg

SEQ ID NO: 4569 - RNA, 10 nt, Unknown
  source: /note="Description of Unknown: Exemplary gene or splice site sequence"
gaggucuaag

SEQ ID NO: 4570 - RNA, 10 nt, Unknown
  source: /note="Description of Unknown: Exemplary gene or splice site sequence"
agaguagagu

SEQ ID NO: 4571 - RNA, 10 nt, Unknown
  source: /note="Description of Unknown: Exemplary gene or splice site sequence"
auggucagua

SEQ ID NO: 4572 - RNA, 10 nt, Unknown
  source: /note="Description of Unknown: Exemplary gene or splice site sequence"
gaggccuggg

SEQ ID NO: 4573 - RNA, 10 nt, Unknown
  source: /note="Description of Unknown: Exemplary gene or splice site sequence"
aagguguggc

SEQ ID NO: 4574 - RNA, 10 nt, Unknown
  source: /note="Description of Unknown: Exemplary gene or splice site sequence"
agagugaucu

SEQ ID NO: 4575 - RNA, 10 nt, Unknown
  source: /note="Description of Unknown: Exemplary gene or splice site sequence"
aagguaucca

SEQ ID NO: 4576 - RNA, 10 nt, Unknown
  source: /note="Description of Unknown: Exemplary gene or splice site sequence"
uucguaagua

SEQ ID NO: 4577 - RNA, 10 nt, Unknown
  source: /note="Description of Unknown: Exemplary gene or splice site sequence"
uaagugggug

SEQ ID NO: 4578 - RNA, 10 nt, Unknown
  source: /note="Description of Unknown: Exemplary gene or splice site sequence"
gccgugaacg

SEQ ID NO: 4579 - RNA, 10 nt, Unknown
  source: /note="Description of Unknown: Exemplary gene or splice site sequence"
gagguugugg

SEQ ID NO: 4580 - RNA, 10 nt, Unknown
  source: /note="Description of Unknown: Exemplary gene or splice site sequence"
uauguaugca

SEQ ID NO: 4581 - RNA, 10 nt, Unknown
  source: /note="Description of Unknown: Exemplary gene or splice site sequence"
uguguaacaa

SEQ ID NO: 4582 - RNA, 10 nt, Unknown
  source: /note="Description of Unknown: Exemplary gene or splice site sequence"
aggguauuag

SEQ ID NO: 4583 - RNA, 10 nt, Unknown
  source: /note="Description of Unknown: Exemplary gene or splice site sequence"
ugaguauauc

SEQ ID NO: 4584 - RNA, 10 nt, Unknown
  source: /note="Description of Unknown: Exemplary gene or splice site sequence"
agaguuugug

SEQ ID NO: 4585 - RNA, 10 nt, Unknown
  source: /note="Description of Unknown: Exemplary gene or splice site sequence"
gaggucgcug

SEQ ID NO: 4586 - RNA, 10 nt, Unknown
  source: /note="Description of Unknown: Exemplary gene or splice site sequence"
gaggucaucg

SEQ ID NO: 4587 - RNA, 10 nt, Unknown
  source: /note="Description of Unknown: Exemplary gene or splice site sequence"
acgguaaagc

SEQ ID NO: 4588 - RNA, 10 nt, Unknown
  source: /note="Description of Unknown: Exemplary gene or splice site sequence"
ugaguacuug

SEQ ID NO: 4589 - RNA, 10 nt, Unknown
  source: /note="Description of Unknown: Exemplary gene or splice site sequence"
cgagucgccg

SEQ ID NO: 4590 - RNA, 10 nt, Unknown
  source: /note="Description of Unknown: Exemplary gene or splice site sequence"
cugguacguc

SEQ ID NO: 4591 - RNA, 10 nt, Unknown
  source: /note="Description of Unknown: Exemplary gene or splice site sequence"
aggguauugc

SEQ ID NO: 4592 - RNA, 10 nt, Unknown
  source: /note="Description of Unknown: Exemplary gene or splice site sequence"
gaagugaaug

SEQ ID NO: 4593 - RNA, 10 nt, Unknown
  source: /note="Description of Unknown: Exemplary gene or splice site sequence"
cagaugaguc

SEQ ID NO: 4594 - RNA, 10 nt, Unknown
  source: /note="Description of Unknown: Exemplary gene or splice site sequence"
uggguauugg

SEQ ID NO: 4595 - RNA, 10 nt, Unknown
  source: /note="Description of Unknown: Exemplary gene or splice site sequence"
ugaguaaaga

SEQ ID NO: 4596 - RNA, 10 nt, Unknown
  source: /note="Description of Unknown: Exemplary gene or splice site sequence"
gugguuccug

SEQ ID NO: 4597 - RNA, 10 nt, Unknown
  source: /note="Description of Unknown: Exemplary gene or splice site sequence"
ugagcaagua

SEQ ID NO: 4598 - RNA, 10 nt, Unknown
  source: /note="Description of Unknown: Exemplary gene or splice site sequence"
uauguaagag

SEQ ID NO: 4599 - RNA, 10 nt, Unknown
  source: /note="Description of Unknown: Exemplary gene or splice site sequence"
aaggucuugc

SEQ ID NO: 4600 - RNA, 10 nt, Unknown
  source: /note="Description of Unknown: Exemplary gene or splice site sequence"
aaagcaugug

SEQ ID NO: 4601 - RNA, 10 nt, Unknown
  source: /note="Description of Unknown: Exemplary gene or splice site sequence"
agaguacagu

SEQ ID NO: 4602 - RNA, 10 nt, Unknown
  source: /note="Description of Unknown: Exemplary gene or splice site sequence"
gugguaaucc

SEQ ID NO: 4603 - RNA, 10 nt, Unknown
  source: /note="Description of Unknown: Exemplary gene or splice site sequence"
cagguagagg

SEQ ID NO: 4604 - RNA, 10 nt, Unknown
  source: /note="Description of Unknown: Exemplary gene or splice site sequence"
aagguacaac

SEQ ID NO: 4605 - RNA, 10 nt, Unknown
  source: /note="Description of Unknown: Exemplary gene or splice site sequence"
ugggcagcau

SEQ ID NO: 4606 - RNA, 10 nt, Unknown
  source: /note="Description of Unknown: Exemplary gene or splice site sequence"
ccggucauca

SEQ ID NO: 4607 - RNA, 10 nt, Unknown
  source: /note="Description of Unknown: Exemplary gene or splice site sequence"
ccgguuugua

SEQ ID NO: 4608 - RNA, 10 nt, Unknown
  source: /note="Description of Unknown: Exemplary gene or splice site sequence"
ugaguaaggg

SEQ ID NO: 4609 - RNA, 10 nt, Unknown
  source: /note="Description of Unknown: Exemplary gene or splice site sequence"
gaaguaugua

SEQ ID NO: 4610 - RNA, 10 nt, Unknown
  source: /note="Description of Unknown: Exemplary gene or splice site sequence"
gggguagcuc

SEQ ID NO: 4611 - RNA, 10 nt, Unknown
  source: /note="Description of Unknown: Exemplary gene or splice site sequence"
gcuguacaua

SEQ ID NO: 4612 - RNA, 10 nt, Unknown
  source: /note="Description of Unknown: Exemplary gene or splice site sequence"
cuggucucuu

SEQ ID NO: 4613 - RNA, 10 nt, Unknown
  source: /note="Description of Unknown: Exemplary gene or splice site sequence"
gugguaaaug

SEQ ID NO: 4614 - RNA, 10 nt, Unknown
  source: /note="Description of Unknown: Exemplary gene or splice site sequence"
aucguaagug

SEQ ID NO: 4615 - RNA, 10 nt, Unknown
  source: /note="Description of Unknown: Exemplary gene or splice site sequence"
gaggcaugua

SEQ ID NO: 4616 - RNA, 10 nt, Unknown
  source: /note="Description of Unknown: Exemplary gene or splice site sequence"
aaggucuccc

SEQ ID NO: 4617 - RNA, 10 nt, Unknown
  source: /note="Description of Unknown: Exemplary gene or splice site sequence"
ugggugcguu

SEQ ID NO: 4618 - RNA, 10 nt, Unknown
  source: /note="Description of Unknown: Exemplary gene or splice site sequence"
uguguagguu

SEQ ID NO: 4619 - RNA, 10 nt, Unknown
  source: /note="Description of Unknown: Exemplary gene or splice site sequence"
gaagugagca

SEQ ID NO: 4620 - RNA, 10 nt, Unknown
  source: /note="Description of Unknown: Exemplary gene or splice site sequence"
gguguaauuu

SEQ ID NO: 4621 - RNA, 10 nt, Unknown
  source: /note="Description of Unknown: Exemplary gene or splice site sequence"
cuggugaaau

SEQ ID NO: 4622 - RNA, 10 nt, Unknown
  source: /note="Description of Unknown: Exemplary gene or splice site sequence"
aucguaaguc

SEQ ID NO: 4623 - RNA, 10 nt, Unknown
  source: /note="Description of Unknown: Exemplary gene or splice site sequence"
agaguaaucc

SEQ ID NO: 4624 - RNA, 10 nt, Unknown
  source: /note="Description of Unknown: Exemplary gene or splice site sequence"
ggaguagguc

SEQ ID NO: 4625 - RNA, 10 nt, Unknown
  source: /note="Description of Unknown: Exemplary gene or splice site sequence"
gagguaccaa

SEQ ID NO: 4626 - RNA, 10 nt, Unknown
  source: /note="Description of Unknown: Exemplary gene or splice site sequence"
cuuguaggug

SEQ ID NO: 4627 - RNA, 10 nt, Unknown
  source: /note="Description of Unknown: Exemplary gene or splice site sequence"
aagguauaag

SEQ ID NO: 4628 - RNA, 10 nt, Unknown
  source: /note="Description of Unknown: Exemplary gene or splice site sequence"
agaguuggua

SEQ ID NO: 4629 - RNA, 10 nt, Unknown
  source: /note="Description of Unknown: Exemplary gene or splice site sequence"
augguuugug

SEQ ID NO: 4630 - RNA, 10 nt, Unknown
  source: /note="Description of Unknown: Exemplary gene or splice site sequence"
ugggucagau

SEQ ID NO: 4631 - RNA, 10 nt, Unknown
  source: /note="Description of Unknown: Exemplary gene or splice site sequence"
agaguaggac

SEQ ID NO: 4632 - RNA, 10 nt, Unknown
  source: /note="Description of Unknown: Exemplary gene or splice site sequence"
agaguagugu

SEQ ID NO: 4633 - RNA, 10 nt, Unknown
  source: /note="Description of Unknown: Exemplary gene or splice site sequence"
agaguaggag

SEQ ID NO: 4634 - RNA, 10 nt, Unknown
  source: /note="Description of Unknown: Exemplary gene or splice site sequence"
caggucucua

SEQ ID NO: 4635 - RNA, 10 nt, Unknown
  source: /note="Description of Unknown: Exemplary gene or splice site sequence"
aagguggaug

SEQ ID NO: 4636 - RNA, 10 nt, Unknown
  source: /note="Description of Unknown: Exemplary gene or splice site sequence"
uggguaucaa

SEQ ID NO: 4637 - RNA, 10 nt, Unknown
  source: /note="Description of Unknown: Exemplary gene or splice site sequence"
gauguaugga

SEQ ID NO: 4638 - RNA, 10 nt, Unknown
  source: /note="Description of Unknown: Exemplary gene or splice site sequence"
aagguguuuc

SEQ ID NO: 4639 - RNA, 10 nt, Unknown
  source: /note="Description of Unknown: Exemplary gene or splice site sequence"
gcaguguaaa

SEQ ID NO: 4640 - RNA, 10 nt, Unknown
  source: /note="Description of Unknown: Exemplary gene or splice site sequence"
uuaguaugua

SEQ ID NO: 4641 - RNA, 10 nt, Unknown
  source: /note="Description of Unknown: Exemplary gene or splice site sequence"
ucuguaugca

SEQ ID NO: 4642 - RNA, 10 nt, Unknown
  source: /note="Description of Unknown: Exemplary gene or splice site sequence"
aauguaaaau

SEQ ID NO: 4643 - RNA, 10 nt, Unknown
  source: /note="Description of Unknown: Exemplary gene or splice site sequence"
agaguaaauu

SEQ ID NO: 4644 - RNA, 10 nt, Unknown
  source: /note="Description of Unknown: Exemplary gene or splice site sequence"
gggguacuuu

SEQ ID NO: 4645 - RNA, 10 nt, Unknown
  source: /note="Description of Unknown: Exemplary gene or splice site sequence"
gaaguuugau

SEQ ID NO: 4646 - RNA, 10 nt, Unknown
  source: /note="Description of Unknown: Exemplary gene or splice site sequence"
aaaguagauu

SEQ ID NO: 4647 - RNA, 10 nt, Unknown
  source: /note="Description of Unknown: Exemplary gene or splice site sequence"
uguguagagu

SEQ ID NO: 4648 - RNA, 10 nt, Unknown
  source: /note="Description of Unknown: Exemplary gene or splice site sequence"
uggguaagcg

SEQ ID NO: 4649 - RNA, 10 nt, Unknown
  source: /note="Description of Unknown: Exemplary gene or splice site sequence"
cggguucagg

SEQ ID NO: 4650 - RNA, 10 nt, Unknown
  source: /note="Description of Unknown: Exemplary gene or splice site sequence"
aggguacgac

SEQ ID NO: 4651 - RNA, 10 nt, Unknown
  source: /note="Description of Unknown: Exemplary gene or splice site sequence"
ucgguaagaa

SEQ ID NO: 4652 - RNA, 10 nt, Unknown
  source: /note="Description of Unknown: Exemplary gene or splice site sequence"
aggguuggca

SEQ ID NO: 4653 - RNA, 10 nt, Unknown
  source: /note="Description of Unknown: Exemplary gene or splice site sequence"
aaaguacagu

SEQ ID NO: 4654 - RNA, 10 nt, Unknown
  source: /note="Description of Unknown: Exemplary gene or splice site sequence"
uaaguuaagg

SEQ ID NO: 4655 - RNA, 10 nt, Unknown
  source: /note="Description of Unknown: Exemplary gene or splice site sequence"
augguaaugu

SEQ ID NO: 4656 - RNA, 10 nt, Unknown
  source: /note="Description of Unknown: Exemplary gene or splice site sequence"
gugguuuuac

SEQ ID NO: 4657 - RNA, 10 nt, Unknown
  source: /note="Description of Unknown: Exemplary gene or splice site sequence"
agaguaacaa

SEQ ID NO: 4658 - RNA, 10 nt, Unknown
  source: /note="Description of Unknown: Exemplary gene or splice site sequence"
aagguagccc

SEQ ID NO: 4659 - RNA, 10 nt, Unknown
  source: /note="Description of Unknown: Exemplary gene or splice site sequence"
gcggugaggc

SEQ ID NO: 4660 - RNA, 10 nt, Unknown
  source: /note="Description of Unknown: Exemplary gene or splice site sequence"
augguucagc

SEQ ID NO: 4661 - RNA, 10 nt, Unknown
  source: /note="Description of Unknown: Exemplary gene or splice site sequence"
aagguacuua

SEQ ID NO: 4662 - RNA, 10 nt, Unknown
  source: /note="Description of Unknown: Exemplary gene or splice site sequence"
aagguccgug

SEQ ID NO: 4663 - RNA, 10 nt, Unknown
  source: /note="Description of Unknown: Exemplary gene or splice site sequence"
uagguaagcg

SEQ ID NO: 4664 - RNA, 10 nt, Unknown
  source: /note="Description of Unknown: Exemplary gene or splice site sequence"
augguaccuu

SEQ ID NO: 4665 - RNA, 10 nt, Unknown
  source: /note="Description of Unknown: Exemplary gene or splice site sequence"
gccguggugg

SEQ ID NO: 4666 - RNA, 10 nt, Unknown
  source: /note="Description of Unknown: Exemplary gene or splice site sequence"
cuggugcguc

SEQ ID NO: 4667 - RNA, 10 nt, Unknown
  source: /note="Description of Unknown: Exemplary gene or splice site sequence"
cagguggaaa

SEQ ID NO: 4668 - RNA, 10 nt, Unknown
  source: /note="Description of Unknown: Exemplary gene or splice site sequence"
aaagucugua

SEQ ID NO: 4669 - RNA, 10 nt, Unknown
  source: /note="Description of Unknown: Exemplary gene or splice site sequence"
gagguaaccc

SEQ ID NO: 4670 - RNA, 10 nt, Unknown
  source: /note="Description of Unknown: Exemplary gene or splice site sequence"
agaguauggg

SEQ ID NO: 4671 - RNA, 10 nt, Unknown
  source: /note="Description of Unknown: Exemplary gene or splice site sequence"
uaugccccug

SEQ ID NO: 4672 - RNA, 10 nt, Unknown
  source: /note="Description of Unknown: Exemplary gene or splice site sequence"
aaggugccag

SEQ ID NO: 4673 - RNA, 10 nt, Unknown
  source: /note="Description of Unknown: Exemplary gene or splice site sequence"
acggugcggc

SEQ ID NO: 4674 - RNA, 10 nt, Unknown
  source: /note="Description of Unknown: Exemplary gene or splice site sequence"
aggguacuga

SEQ ID NO: 4675 - RNA, 10 nt, Unknown
  source: /note="Description of Unknown: Exemplary gene or splice site sequence"
agaguaagcg

SEQ ID NO: 4676 - RNA, 10 nt, Unknown
  source: /note="Description of Unknown: Exemplary gene or splice site sequence"
cuggcaaggg

SEQ ID NO: 4677 - RNA, 10 nt, Unknown
  source: /note="Description of Unknown: Exemplary gene or splice site sequence"
ccagugugug

SEQ ID NO: 4678 - RNA, 10 nt, Unknown
  source: /note="Description of Unknown: Exemplary gene or splice site sequence"
gagguagacg

SEQ ID NO: 4679 - RNA, 10 nt, Unknown
  source: /note="Description of Unknown: Exemplary gene or splice site sequence"
cgggugcggg

SEQ ID NO: 4680 - RNA, 10 nt, Unknown
  source: /note="Description of Unknown: Exemplary gene or splice site sequence"
gauguaagcu

SEQ ID NO: 4681 - RNA, 10 nt, Unknown
  source: /note="Description of Unknown: Exemplary gene or splice site sequence"
auuguauuua

SEQ ID NO: 4682 - RNA, 10 nt, Unknown
  source: /note="Description of Unknown: Exemplary gene or splice site sequence"
ugcgugagug

SEQ ID NO: 4683 - RNA, 10 nt, Unknown
  source: /note="Description of Unknown: Exemplary gene or splice site sequence"
cuggucuaua

SEQ ID NO: 4684 - RNA, 10 nt, Unknown
  source: /note="Description of Unknown: Exemplary gene or splice site sequence"
gaggugcuag

SEQ ID NO: 4685 - RNA, 10 nt, Unknown
  source: /note="Description of Unknown: Exemplary gene or splice site sequence"
gaggugccau

SEQ ID NO: 4686 - RNA, 10 nt, Unknown
  source: /note="Description of Unknown: Exemplary gene or splice site sequence"
cagguacguc

SEQ ID NO: 4687 - RNA, 10 nt, Unknown
  source: /note="Description of Unknown: Exemplary gene or splice site sequence"
gagguucagc

SEQ ID NO: 4688 - RNA, 10 nt, Unknown
  source: /note="Description of Unknown: Exemplary gene or splice site sequence"
aacguaagaa

SEQ ID NO: 4689 - RNA, 10 nt, Unknown
  source: /note="Description of Unknown: Exemplary gene or splice site sequence"
agaguaguac

SEQ ID NO: 4690 - RNA, 10 nt, Unknown
  source: /note="Description of Unknown: Exemplary gene or splice site sequence"
aagguaacgg

SEQ ID NO: 4691 - RNA, 10 nt, Unknown
  source: /note="Description of Unknown: Exemplary gene or splice site sequence"
uaggugugac

SEQ ID NO: 4692 - RNA, 10 nt, Unknown
  source: /note="Description of Unknown: Exemplary gene or splice site sequence"
ccgguaauag

SEQ ID NO: 4693 - RNA, 10 nt, Unknown
  source: /note="Description of Unknown: Exemplary gene or splice site sequence"
cagguaccag

SEQ ID NO: 4694 - RNA, 10 nt, Unknown
  source: /note="Description of Unknown: Exemplary gene or splice site sequence"
uuuguaauug

SEQ ID NO: 4695 - RNA, 10 nt, Unknown
  source: /note="Description of Unknown: Exemplary gene or splice site sequence"
aauguacgaa

SEQ ID NO: 4696 - RNA, 10 nt, Unknown
  source: /note="Description of Unknown: Exemplary gene or splice site sequence"
cagguaauga

SEQ ID NO: 4697 - RNA, 10 nt, Unknown
  source: /note="Description of Unknown: Exemplary gene or splice site sequence"
aucgucaagg

SEQ ID NO: 4698 - RNA, 10 nt, Unknown
  source: /note="Description of Unknown: Exemplary gene or splice site sequence"
cugguagaug

SEQ ID NO: 4699 - RNA, 10 nt, Unknown
  source: /note="Description of Unknown: Exemplary gene or splice site sequence"
ggggugcagu

SEQ ID NO: 4700 - RNA, 10 nt, Unknown
  source: /note="Description of Unknown: Exemplary gene or splice site sequence"
agugugagaa

SEQ ID NO: 4701 - RNA, 10 nt, Unknown
  source: /note="Description of Unknown: Exemplary gene or splice site sequence"
gggguuuuau

SEQ ID NO: 4702 - RNA, 10 nt, Unknown
  source: /note="Description of Unknown: Exemplary gene or splice site sequence"
ccuguccccu

SEQ ID NO: 4703 - RNA, 10 nt, Unknown
  source: /note="Description of Unknown: Exemplary gene or splice site sequence"
auugugaagu

SEQ ID NO: 4704 - RNA, 10 nt, Unknown
  source: /note="Description of Unknown: Exemplary gene or splice site sequence"
aagguaaacg

SEQ ID NO: 4705 - RNA, 10 nt, Unknown
  source: /note="Description of Unknown: Exemplary gene or splice site sequence"
uacgucgugg

SEQ ID NO: 4706 - RNA, 10 nt, Unknown
  source: /note="Description of Unknown: Exemplary gene or splice site sequence"
aaggugccau

SEQ ID NO: 4707 - RNA, 10 nt, Unknown
  source: /note="Description of Unknown: Exemplary gene or splice site sequence"
ggggucccag

SEQ ID NO: 4708 - RNA, 10 nt, Unknown
  source: /note="Description of Unknown: Exemplary gene or splice site sequence"
uauguauggu

SEQ ID NO: 4709 - RNA, 10 nt, Unknown
  source: /note="Description of Unknown: Exemplary gene or splice site sequence"
cggguaauua

SEQ ID NO: 4710 - RNA, 10 nt, Unknown
  source: /note="Description of Unknown: Exemplary gene or splice site sequence"
cggguacucc

SEQ ID NO: 4711 - RNA, 10 nt, Unknown
  source: /note="Description of Unknown: Exemplary gene or splice site sequence"
caggugacuu

SEQ ID NO: 4712 - RNA, 10 nt, Unknown
  source: /note="Description of Unknown: Exemplary gene or splice site sequence"
aguguggguu

SEQ ID NO: 4713 - RNA, 10 nt, Unknown
  source: /note="Description of Unknown: Exemplary gene or splice site sequence"
agaguauggc

SEQ ID NO: 4714 - RNA, 10 nt, Unknown
  source: /note="Description of Unknown: Exemplary gene or splice site sequence"
aaggccaaca

SEQ ID NO: 4715 - RNA, 10 nt, Unknown
  source: /note="Description of Unknown: Exemplary gene or splice site sequence"
aaagcaagua

SEQ ID NO: 4716 - RNA, 10 nt, Unknown
  source: /note="Description of Unknown: Exemplary gene or splice site sequence"
ucaguagguc

SEQ ID NO: 4717 - RNA, 10 nt, Unknown
  source: /note="Description of Unknown: Exemplary gene or splice site sequence"
gugguggcgg

SEQ ID NO: 4718 - RNA, 10 nt, Unknown
  source: /note="Description of Unknown: Exemplary gene or splice site sequence"
cauguauccu

SEQ ID NO: 4719 - RNA, 10 nt, Unknown
  source: /note="Description of Unknown: Exemplary gene or splice site sequence"
ucggugagcc

SEQ ID NO: 4720 - RNA, 10 nt, Unknown
  source: /note="Description of Unknown: Exemplary gene or splice site sequence"
auaguugggu

SEQ ID NO: 4721 - RNA, 10 nt, Unknown
  source: /note="Description of Unknown: Exemplary gene or splice site sequence"
aauguuagcu

SEQ ID NO: 4722 - RNA, 10 nt, Unknown
  source: /note="Description of Unknown: Exemplary gene or splice site sequence"
auggugaaug

SEQ ID NO: 4723 - RNA, 10 nt, Unknown
  source: /note="Description of Unknown: Exemplary gene or splice site sequence"
cggguaaugu

SEQ ID NO: 4724 - RNA, 10 nt, Unknown
  source: /note="Description of Unknown: Exemplary gene or splice site sequence"
ucuguaggug

SEQ ID NO: 4725 - RNA, 10 nt, Unknown
  source: /note="Description of Unknown: Exemplary gene or splice site sequence"
ccggugaggc

SEQ ID NO: 4726 - RNA, 10 nt, Unknown
  source: /note="Description of Unknown: Exemplary gene or splice site sequence"
ugaguccacu

SEQ ID NO: 4727 - RNA, 10 nt, Unknown
  source: /note="Description of Unknown: Exemplary gene or splice site sequence"
cuaguaagag

SEQ ID NO: 4728 - RNA, 10 nt, Unknown
  source: /note="Description of Unknown: Exemplary gene or splice site sequence"
cggguggggc

SEQ ID NO: 4729 - RNA, 10 nt, Unknown
  source: /note="Description of Unknown: Exemplary gene or splice site sequence"
cgaguaagca

SEQ ID NO: 4730 - RNA, 10 nt, Unknown
  source: /note="Description of Unknown: Exemplary gene or splice site sequence"
ugugccaauu

SEQ ID NO: 4731 - RNA, 10 nt, Unknown
  source: /note="Description of Unknown: Exemplary gene or splice site sequence"
ucgguaagcc

SEQ ID NO: 4732 - RNA, 10 nt, Unknown
  source: /note="Description of Unknown: Exemplary gene or splice site sequence"
uauguaggug

SEQ ID NO: 4733 - RNA, 10 nt, Unknown
  source: /note="Description of Unknown: Exemplary gene or splice site sequence"
uuggugggcc

SEQ ID NO: 4734 - RNA, 10 nt, Unknown
  source: /note="Description of Unknown: Exemplary gene or splice site sequence"
gaggcugggc

SEQ ID NO: 4735 - RNA, 10 nt, Unknown
  source: /note="Description of Unknown: Exemplary gene or splice site sequence"
agaguaacuu

SEQ ID NO: 4736 - RNA, 10 nt, Unknown
  source: /note="Description of Unknown: Exemplary gene or splice site sequence"
acgguagguc

SEQ ID NO: 4737 - RNA, 10 nt, Unknown
  source: /note="Description of Unknown: Exemplary gene or splice site sequence"
caggcccaga

SEQ ID NO: 4738 - RNA, 10 nt, Unknown
  source: /note="Description of Unknown: Exemplary gene or splice site sequence"
ccgguggguu

SEQ ID NO: 4739 - RNA, 10 nt, Unknown
  source: /note="Description of Unknown: Exemplary gene or splice site sequence"
aaggugacgg

SEQ ID NO: 4740 - RNA, 10 nt, Unknown
  source: /note="Description of Unknown: Exemplary gene or splice site sequence"
gggguacagc

SEQ ID NO: 4741 - RNA, 10 nt, Unknown
  source: /note="Description of Unknown: Exemplary gene or splice site sequence"
cauguaaguc

SEQ ID NO: 4742 - RNA, 10 nt, Unknown
  source: /note="Description of Unknown: Exemplary gene or splice site sequence"
auugugagaa

SEQ ID NO: 4743 - RNA, 10 nt, Unknown
  source: /note="Description of Unknown: Exemplary gene or splice site sequence"
uguguaagga

SEQ ID NO: 4744 - RNA, 10 nt, Unknown
  source: /note="Description of Unknown: Exemplary gene or splice site sequence"
uuuguaagau

SEQ ID NO: 4745 - RNA, 10 nt, Unknown
  source: /note="Description of Unknown: Exemplary gene or splice site sequence"
agggucauuu

SEQ ID NO: 4746 - RNA, 10 nt, Unknown
  source: /note="Description of Unknown: Exemplary gene or splice site sequence"
uggguuuguu

SEQ ID NO: 4747 - RNA, 10 nt, Unknown
  source: /note="Description of Unknown: Exemplary gene or splice site sequence"
cgaguaagcc

SEQ ID NO: 4748 - RNA, 10 nt, Unknown
  source: /note="Description of Unknown: Exemplary gene or splice site sequence"
guggugugua

SEQ ID NO: 4749 - RNA, 10 nt, Unknown
  source: /note="Description of Unknown: Exemplary gene or splice site sequence"
augguauaac

SEQ ID NO: 4750 - RNA, 10 nt, Unknown
  source: /note="Description of Unknown: Exemplary gene or splice site sequence"
uggguacgua

SEQ ID NO: 4751 - RNA, 10 nt, Unknown
  source: /note="Description of Unknown: Exemplary gene or splice site sequence"
aaaguagagu

SEQ ID NO: 4752 - RNA, 10 nt, Unknown
  source: /note="Description of Unknown: Exemplary gene or splice site sequence"
ucgguaacug

SEQ ID NO: 4753 - RNA, 10 nt, Unknown
  source: /note="Description of Unknown: Exemplary gene or splice site sequence"
agaguaauga

SEQ ID NO: 4754 - RNA, 10 nt, Unknown
  source: /note="Description of Unknown: Exemplary gene or splice site sequence"
augguggguc

SEQ ID NO: 4755 - RNA, 10 nt, Unknown
  source: /note="Description of Unknown: Exemplary gene or splice site sequence"
agaguaauau

SEQ ID NO: 4756 - RNA, 10 nt, Unknown
  source: /note="Description of Unknown: Exemplary gene or splice site sequence"
cagguacugg

SEQ ID NO: 4757 - RNA, 10 nt, Unknown
  source: /note="Description of Unknown: Exemplary gene or splice site sequence"
uaagucaguu

SEQ ID NO: 4758 - RNA, 10 nt, Unknown
  source: /note="Description of Unknown: Exemplary gene or splice site sequence"
gcgguagaga

SEQ ID NO: 4759 - RNA, 10 nt, Unknown
  source: /note="Description of Unknown: Exemplary gene or splice site sequence"
aaggugaugg

SEQ ID NO: 4760 - RNA, 10 nt, Unknown
  source: /note="Description of Unknown: Exemplary gene or splice site sequence"
acaguauguu

SEQ ID NO: 4761 - RNA, 10 nt, Unknown
  source: /note="Description of Unknown: Exemplary gene or splice site sequence"
gauguacguc

SEQ ID NO: 4762 - RNA, 10 nt, Unknown
  source: /note="Description of Unknown: Exemplary gene or splice site sequence"
uagguuucuc

SEQ ID NO: 4763 - RNA, 10 nt, Unknown
  source: /note="Description of Unknown: Exemplary gene or splice site sequence"
gaggcauggg

SEQ ID NO: 4764 - RNA, 10 nt, Unknown
  source: /note="Description of Unknown: Exemplary gene or splice site sequence"
auagcuaagu

SEQ ID NO: 4765 - RNA, 10 nt, Unknown
  source: /note="Description of Unknown: Exemplary gene or splice site sequence"
guagucugua

SEQ ID NO: 4766 - RNA, 10 nt, Unknown
  source: /note="Description of Unknown: Exemplary gene or splice site sequence"
aaggugaacg

SEQ ID NO: 4767 - RNA, 10 nt, Unknown
  source: /note="Description of Unknown: Exemplary gene or splice site sequence"
gugguggucg

SEQ ID NO: 4768 - RNA, 10 nt, Unknown
  source: /note="Description of Unknown: Exemplary gene or splice site sequence"
gagguugauc

SEQ ID NO: 4769 - RNA, 10 nt, Unknown
  source: /note="Description of Unknown: Exemplary gene or splice site sequence"
ugaguggguu

SEQ ID NO: 4770 - RNA, 10 nt, Unknown
  source: /note="Description of Unknown: Exemplary gene or splice site sequence"
acuguacgug

SEQ ID NO: 4771 - RNA, 10 nt, Unknown
  source: /note="Description of Unknown: Exemplary gene or splice site sequence"
cuggugacug

SEQ ID NO: 4772 - RNA, 10 nt, Unknown
  source: /note="Description of Unknown: Exemplary gene or splice site sequence"
caaguuaagc

SEQ ID NO: 4773 - RNA, 10 nt, Unknown
  source: /note="Description of Unknown: Exemplary gene or splice site sequence"
gagguaccca

SEQ ID NO: 4774 - RNA, 10 nt, Unknown
  source: /note="Description of Unknown: Exemplary gene or splice site sequence"
aacguaacuu

SEQ ID NO: 4775 - RNA, 10 nt, Unknown
  source: /note="Description of Unknown: Exemplary gene or splice site sequence"
cagguuacua

SEQ ID NO: 4776 - RNA, 10 nt, Unknown
  source: /note="Description of Unknown: Exemplary gene or splice site sequence"
agaguuaguc

SEQ ID NO: 4777 - RNA, 10 nt, Unknown
  source: /note="Description of Unknown: Exemplary gene or splice site sequence"
ugggcacguc

SEQ ID NO: 4778 - RNA, 10 nt, Unknown
  source: /note="Description of Unknown: Exemplary gene or splice site sequence"
aguguauggu

SEQ ID NO: 4779 - RNA, 10 nt, Unknown
  source: /note="Description of Unknown: Exemplary gene or splice site sequence"
aagguugcaa

SEQ ID NO: 4780 - RNA, 10 nt, Unknown
  source: /note="Description of Unknown: Exemplary gene or splice site sequence"
cagguuguua

SEQ ID NO: 4781 - RNA, 10 nt, Unknown
  source: /note="Description of Unknown: Exemplary gene or splice site sequence"
aaggcauccc

SEQ ID NO: 4782 - RNA, 10 nt, Unknown
  source: /note="Description of Unknown: Exemplary gene or splice site sequence"
gauguaaggc

SEQ ID NO: 4783 - RNA, 10 nt, Unknown
  source: /note="Description of Unknown: Exemplary gene or splice site sequence"
aggguacggg

SEQ ID NO: 4784 - RNA, 10 nt, Unknown
  source: /note="Description of Unknown: Exemplary gene or splice site sequence"
gaggucaaag

SEQ ID NO: 4785 - RNA, 10 nt, Unknown
  source: /note="Description of Unknown: Exemplary gene or splice site sequence"
caagugagcg

SEQ ID NO: 4786 - RNA, 10 nt, Unknown
  source: /note="Description of Unknown: Exemplary gene or splice site sequence"
agaguaaucu

SEQ ID NO: 4787 - RNA, 10 nt, Unknown
  source: /note="Description of Unknown: Exemplary gene or splice site sequence"
ucgguagcug

SEQ ID NO: 4788 - RNA, 10 nt, Unknown
  source: /note="Description of Unknown: Exemplary gene or splice site sequence"
aaaguaguag

SEQ ID NO: 4789 - RNA, 10 nt, Unknown
  source: /note="Description of Unknown: Exemplary gene or splice site sequence"
cagguucguc

SEQ ID NO: 4790 - RNA, 10 nt, Unknown
  source: /note="Description of Unknown: Exemplary gene or splice site sequence"
cguguaugaa

SEQ ID NO: 4791 - RNA, 10 nt, Unknown
  source: /note="Description of Unknown: Exemplary gene or splice site sequence"
aguguaaaaa

SEQ ID NO: 4792 - RNA, 10 nt, Unknown
  source: /note="Description of Unknown: Exemplary gene or splice site sequence"
aaggucucac

SEQ ID NO: 4793 - RNA, 10 nt, Unknown
  source: /note="Description of Unknown: Exemplary gene or splice site sequence"
uagguggagc

SEQ ID NO: 4794 - RNA, 10 nt, Unknown
  source: /note="Description of Unknown: Exemplary gene or splice site sequence"
ugaguaggug

SEQ ID NO: 4795 - RNA, 10 nt, Unknown
  source: /note="Description of Unknown: Exemplary gene or splice site sequence"
agaguaugcc

SEQ ID NO: 4796 - RNA, 10 nt, Unknown
  source: /note="Description of Unknown: Exemplary gene or splice site sequence"
gagguugcau

SEQ ID NO: 4797 - RNA, 10 nt, Unknown
  source: /note="Description of Unknown: Exemplary gene or splice site sequence"
caaguaagag

SEQ ID NO: 4798 - RNA, 10 nt, Unknown
  source: /note="Description of Unknown: Exemplary gene or splice site sequence"
ucugugugcc

SEQ ID NO: 4799 - RNA, 10 nt, Unknown
  source: /note="Description of Unknown: Exemplary gene or splice site sequence"
gaggugaugc

SEQ ID NO: 4800 - RNA, 10 nt, Unknown
  source: /note="Description of Unknown: Exemplary gene or splice site sequence"
ggggugauaa

SEQ ID NO: 4801 - RNA, 10 nt, Unknown
  source: /note="Description of Unknown: Exemplary gene or splice site sequence"
cccgugagcc

SEQ ID NO: 4802 - RNA, 10 nt, Unknown
  source: /note="Description of Unknown: Exemplary gene or splice site sequence"
agaguaacug

SEQ ID NO: 4803 - RNA, 10 nt, Unknown
  source: /note="Description of Unknown: Exemplary gene or splice site sequence"
gcgguaagua

SEQ ID NO: 4804 - RNA, 10 nt, Unknown
  source: /note="Description of Unknown: Exemplary gene or splice site sequence"
agaguacauc

SEQ ID NO: 4805 - RNA, 10 nt, Unknown
  source: /note="Description of Unknown: Exemplary gene or splice site sequence"
ucggucuggg

SEQ ID NO: 4806 - RNA, 10 nt, Unknown
  source: /note="Description of Unknown: Exemplary gene or splice site sequence"
uaaguaucuc

SEQ ID NO: 4807 - RNA, 10 nt, Unknown
  source: /note="Description of Unknown: Exemplary gene or splice site sequence"
ggcguagguu

SEQ ID NO: 4808 - RNA, 10 nt, Unknown
  source: /note="Description of Unknown: Exemplary gene or splice site sequence"
agaguacgcc

SEQ ID NO: 4809 - RNA, 10 nt, Unknown
  source: /note="Description of Unknown: Exemplary gene or splice site sequence"
gaugucuucu

SEQ ID NO: 4810 - RNA, 10 nt, Unknown
  source: /note="Description of Unknown: Exemplary gene or splice site sequence"
agggcaaggu

SEQ ID NO: 4811 - RNA, 10 nt, Unknown
  source: /note="Description of Unknown: Exemplary gene or splice site sequence"
cgaguaugau

SEQ ID NO: 4812 - RNA, 10 nt, Unknown
  source: /note="Description of Unknown: Exemplary gene or splice site sequence"
augguagagu

SEQ ID NO: 4813 - RNA, 10 nt, Unknown
  source: /note="Description of Unknown: Exemplary gene or splice site sequence"
caaguacgag

SEQ ID NO: 4814 - RNA, 10 nt, Unknown
  source: /note="Description of Unknown: Exemplary gene or splice site sequence"
ucgguaugau

SEQ ID NO: 4815 - RNA, 10 nt, Unknown
  source: /note="Description of Unknown: Exemplary gene or splice site sequence"
ccgguguguu

SEQ ID NO: 4816 - RNA, 10 nt, Unknown
  source: /note="Description of Unknown: Exemplary gene or splice site sequence"
agggucugug

SEQ ID NO: 4817 - RNA, 10 nt, Unknown
  source: /note="Description of Unknown: Exemplary gene or splice site sequence"
ggaguaggcu

SEQ ID NO: 4818 - RNA, 10 nt, Unknown
  source: /note="Description of Unknown: Exemplary gene or splice site sequence"
aaggucuaug

SEQ ID NO: 4819 - RNA, 10 nt, Unknown
  source: /note="Description of Unknown: Exemplary gene or splice site sequence"
gcagugcgug

SEQ ID NO: 4820 - RNA, 10 nt, Unknown
  source: /note="Description of Unknown: Exemplary gene or splice site sequence"
ugggugagaa

SEQ ID NO: 4821 - RNA, 10 nt, Unknown
  source: /note="Description of Unknown: Exemplary gene or splice site sequence"
aggguaaagu

SEQ ID NO: 4822 - RNA, 10 nt, Unknown
  source: /note="Description of Unknown: Exemplary gene or splice site sequence"
gagguaggac

SEQ ID NO: 4823 - RNA, 10 nt, Unknown
  source: /note="Description of Unknown: Exemplary gene or splice site sequence"
cuaguaagca

SEQ ID NO: 4824 - RNA, 10 nt, Unknown
  source: /note="Description of Unknown: Exemplary gene or splice site sequence"
uuaguaggcu

SEQ ID NO: 4825 - RNA, 10 nt, Unknown
  source: /note="Description of Unknown: Exemplary gene or splice site sequence"
cuggugggau

SEQ ID NO: 4826 - RNA, 10 nt, Unknown
  source: /note="Description of Unknown: Exemplary gene or splice site sequence"
cugguuagua

SEQ ID NO: 4827 - RNA, 10 nt, Unknown
  source: /note="Description of Unknown: Exemplary gene or splice site sequence"
aagguacgug

SEQ ID NO: 4828 - RNA, 10 nt, Unknown
  source: /note="Description of Unknown: Exemplary gene or splice site sequence"
cgggugagau

SEQ ID NO: 4829 - RNA, 10 nt, Unknown
  source: /note="Description of Unknown: Exemplary gene or splice site sequence"
aaggugcaug

SEQ ID NO: 4830 - RNA, 10 nt, Unknown
  source: /note="Description of Unknown: Exemplary gene or splice site sequence"
aaugugggcu

SEQ ID NO: 4831 - RNA, 10 nt, Unknown
  source: /note="Description of Unknown: Exemplary gene or splice site sequence"
cagguugacu

SEQ ID NO: 4832 - RNA, 10 nt, Unknown
  source: /note="Description of Unknown: Exemplary gene or splice site sequence"
cagguuacag

SEQ ID NO: 4833 - RNA, 10 nt, Unknown
  source: /note="Description of Unknown: Exemplary gene or splice site sequence"
gcgguaacau

SEQ ID NO: 4834 - RNA, 10 nt, Unknown
  source: /note="Description of Unknown: Exemplary gene or splice site sequence"
auugucaguc

SEQ ID NO: 4835 - RNA, 10 nt, Unknown
  source: /note="Description of Unknown: Exemplary gene or splice site sequence"
caaguauaca

SEQ ID NO: 4836 - RNA, 10 nt, Unknown
  source: /note="Description of Unknown: Exemplary gene or splice site sequence"
gauguccgcc

SEQ ID NO: 4837 - RNA, 10 nt, Unknown
  source: /note="Description of Unknown: Exemplary gene or splice site sequence"
aaggugcgga

SEQ ID NO: 4838 - RNA, 10 nt, Unknown
  source: /note="Description of Unknown: Exemplary gene or splice site sequence"
aacguaagag

SEQ ID NO: 4839 - RNA, 10 nt, Unknown
  source: /note="Description of Unknown: Exemplary gene or splice site sequence"
uggguuggua

SEQ ID NO: 4840 - RNA, 10 nt, Unknown
  source: /note="Description of Unknown: Exemplary gene or splice site sequence"
caaguguaag

SEQ ID NO: 4841 - RNA, 10 nt, Unknown
  source: /note="Description of Unknown: Exemplary gene or splice site sequence"
gugguaacgu

SEQ ID NO: 4842 - RNA, 10 nt, Unknown
  source: /note="Description of Unknown: Exemplary gene or splice site sequence"
cuggugauca

SEQ ID NO: 4843 - RNA, 10 nt, Unknown
  source: /note="Description of Unknown: Exemplary gene or splice site sequence"
aggguggggc

SEQ ID NO: 4844 - RNA, 10 nt, Unknown
  source: /note="Description of Unknown: Exemplary gene or splice site sequence"
ucgguaaaga

SEQ ID NO: 4845 - RNA, 10 nt, Unknown
  source: /note="Description of Unknown: Exemplary gene or splice site sequence"
cagguacacc

SEQ ID NO: 4846 - RNA, 10 nt, Unknown
  source: /note="Description of Unknown: Exemplary gene or splice site sequence"
cggguaaggg

SEQ ID NO: 4847 - RNA, 10 nt, Unknown
  source: /note="Description of Unknown: Exemplary gene or splice site sequence"
caaguuugcu

SEQ ID NO: 4848 - RNA, 10 nt, Unknown
  source: /note="Description of Unknown: Exemplary gene or splice site sequence"
acagugcgug

SEQ ID NO: 4849 - RNA, 10 nt, Unknown
  source: /note="Description of Unknown: Exemplary gene or splice site sequence"
uugguauggg

SEQ ID NO: 4850 - RNA, 10 nt, Unknown
  source: /note="Description of Unknown: Exemplary gene or splice site sequence"
gaggcucauc

SEQ ID NO: 4851 - RNA, 10 nt, Unknown
  source: /note="Description of Unknown: Exemplary gene or splice site sequence"
cugguaauag

SEQ ID NO: 4852 - RNA, 10 nt, Unknown
  source: /note="Description of Unknown: Exemplary gene or splice site sequence"
augguggaua

SEQ ID NO: 4853 - RNA, 10 nt, Unknown
  source: /note="Description of Unknown: Exemplary gene or splice site sequence"
ucagugaauu

SEQ ID NO: 4854 - RNA, 10 nt, Unknown
  source: /note="Description of Unknown: Exemplary gene or splice site sequence"
aauguaauua

SEQ ID NO: 4855 - RNA, 10 nt, Unknown
  source: /note="Description of Unknown: Exemplary gene or splice site sequence"
gcagucuaaa

SEQ ID NO: 4856 - RNA, 10 nt, Unknown
  source: /note="Description of Unknown: Exemplary gene or splice site sequence"
aagguauucu

SEQ ID NO: 4857 - RNA, 10 nt, Unknown
  source: /note="Description of Unknown: Exemplary gene or splice site sequence"
gaggucauca

SEQ ID NO: 4858 - RNA, 10 nt, Unknown
  source: /note="Description of Unknown: Exemplary gene or splice site sequence"
uggguccaug

SEQ ID NO: 4859 - RNA, 10 nt, Unknown
  source: /note="Description of Unknown: Exemplary gene or splice site sequence"
agaguuugua

SEQ ID NO: 4860 - RNA, 10 nt, Unknown
  source: /note="Description of Unknown: Exemplary gene or splice site sequence"
aggguagacu

SEQ ID NO: 4861 - RNA, 10 nt, Unknown
  source: /note="Description of Unknown: Exemplary gene or splice site sequence"
aagguaggac

SEQ ID NO: 4862 - RNA, 10 nt, Unknown
  source: /note="Description of Unknown: Exemplary gene or splice site sequence"
uguguguuga

SEQ ID NO: 4863 - RNA, 10 nt, Unknown
  source: /note="Description of Unknown: Exemplary gene or splice site sequence"
ucaguacgug

SEQ ID NO: 4864 - RNA, 10 nt, Unknown
  source: /note="Description of Unknown: Exemplary gene or splice site sequence"
auggucucuc

SEQ ID NO: 4865 - RNA, 10 nt, Unknown
  source: /note="Description of Unknown: Exemplary gene or splice site sequence"
ugaguuagua

SEQ ID NO: 4866 - RNA, 10 nt, Unknown
  source: /note="Description of Unknown: Exemplary gene or splice site sequence"
ugaguaaagu

SEQ ID NO: 4867 - RNA, 10 nt, Unknown
  source: /note="Description of Unknown: Exemplary gene or splice site sequence"
gaggugaccg

SEQ ID NO: 4868 - RNA, 10 nt, Unknown
  source: /note="Description of Unknown: Exemplary gene or splice site sequence"
gagguauauc

SEQ ID NO: 4869 - RNA, 10 nt, Unknown
  source: /note="Description of Unknown: Exemplary gene or splice site sequence"
caggugccau

SEQ ID NO: 4870 - RNA, 10 nt, Unknown
  source: /note="Description of Unknown: Exemplary gene or splice site sequence"
agagugguga

SEQ ID NO: 4871 - RNA, 10 nt, Unknown
  source: /note="Description of Unknown: Exemplary gene or splice site sequence"
guuguaagaa

SEQ ID NO: 4872 - RNA, 10 nt, Unknown
  source: /note="Description of Unknown: Exemplary gene or splice site sequence"
agaguaaaua

SEQ ID NO: 4873 - RNA, 10 nt, Unknown
  source: /note="Description of Unknown: Exemplary gene or splice site sequence"
agggugaagg

SEQ ID NO: 4874 - RNA, 10 nt, Unknown
  source: /note="Description of Unknown: Exemplary gene or splice site sequence"
cugguagauu

SEQ ID NO: 4875 - RNA, 10 nt, Unknown
  source: /note="Description of Unknown: Exemplary gene or splice site sequence"
gagguucagg

SEQ ID NO: 4876 - RNA, 10 nt, Unknown
  source: /note="Description of Unknown: Exemplary gene or splice site sequence"
agggucuuca

SEQ ID NO: 4877 - RNA, 10 nt, Unknown
  source: /note="Description of Unknown: Exemplary gene or splice site sequence"
cugguaaccu

SEQ ID NO: 4878 - RNA, 10 nt, Unknown
  source: /note="Description of Unknown: Exemplary gene or splice site sequence"
acaguacuga

SEQ ID NO: 4879 - RNA, 10 nt, Unknown
  source: /note="Description of Unknown: Exemplary gene or splice site sequence"
agaguggguc

SEQ ID NO: 4880 - RNA, 10 nt, Unknown
  source: /note="Description of Unknown: Exemplary gene or splice site sequence"
augguaugag

SEQ ID NO: 4881 - RNA, 10 nt, Unknown
  source: /note="Description of Unknown: Exemplary gene or splice site sequence"
aagguuauau

SEQ ID NO: 4882 - RNA, 10 nt, Unknown
  source: /note="Description of Unknown: Exemplary gene or splice site sequence"
agaguauagu

SEQ ID NO: 4883 - RNA, 10 nt, Unknown
  source: /note="Description of Unknown: Exemplary gene or splice site sequence"
aaaguaugaa

SEQ ID NO: 4884 - RNA, 10 nt, Unknown
  source: /note="Description of Unknown: Exemplary gene or splice site sequence"
uagguggcua

SEQ ID NO: 4885 - RNA, 10 nt, Unknown
  source: /note="Description of Unknown: Exemplary gene or splice site sequence"
accguauggg

SEQ ID NO: 4886 - RNA, 10 nt, Unknown
  source: /note="Description of Unknown: Exemplary gene or splice site sequence"
aaaguauaau

SEQ ID NO: 4887 - RNA, 10 nt, Unknown
  source: /note="Description of Unknown: Exemplary gene or splice site sequence"
uuuguauggc

SEQ ID NO: 4888 - RNA, 10 nt, Unknown
  source: /note="Description of Unknown: Exemplary gene or splice site sequence"
ggggucgcgu

SEQ ID NO: 4889 - RNA, 10 nt, Unknown
  source: /note="Description of Unknown: Exemplary gene or splice site sequence"
guggugguuu

SEQ ID NO: 4890 - RNA, 10 nt, Unknown
  source: /note="Description of Unknown: Exemplary gene or splice site sequence"
cagguuugac

SEQ ID NO: 4891 - RNA, 10 nt, Unknown
  source: /note="Description of Unknown: Exemplary gene or splice site sequence"
ggaguaggcg

SEQ ID NO: 4892 - RNA, 10 nt, Unknown
  source: /note="Description of Unknown: Exemplary gene or splice site sequence"
gagguacccu

SEQ ID NO: 4893 - RNA, 10 nt, Unknown
  source: /note="Description of Unknown: Exemplary gene or splice site sequence"
auggugugca

SEQ ID NO: 4894 - RNA, 10 nt, Unknown
  source: /note="Description of Unknown: Exemplary gene or splice site sequence"
gugguuggug

SEQ ID NO: 4895 - RNA, 10 nt, Unknown
  source: /note="Description of Unknown: Exemplary gene or splice site sequence"
aaaguaugcu

SEQ ID NO: 4896 - RNA, 10 nt, Unknown
  source: /note="Description of Unknown: Exemplary gene or splice site sequence"
uaaguuacau

SEQ ID NO: 4897 - RNA, 10 nt, Unknown
  source: /note="Description of Unknown: Exemplary gene or splice site sequence"
acaguaugag

SEQ ID NO: 4898 - RNA, 10 nt, Unknown
  source: /note="Description of Unknown: Exemplary gene or splice site sequence"
ggaguauguu

SEQ ID NO: 4899 - RNA, 10 nt, Unknown
  source: /note="Description of Unknown: Exemplary gene or splice site sequence"
uuugugagaa

SEQ ID NO: 4900 - RNA, 10 nt, Unknown
  source: /note="Description of Unknown: Exemplary gene or splice site sequence"
aaugugcguu

SEQ ID NO: 4901 - RNA, 10 nt, Unknown
  source: /note="Description of Unknown: Exemplary gene or splice site sequence"
cagguagagu

SEQ ID NO: 4902 - RNA, 10 nt, Unknown
  source: /note="Description of Unknown: Exemplary gene or splice site sequence"
augguguuaa

SEQ ID NO: 4903 - RNA, 10 nt, Unknown
  source: /note="Description of Unknown: Exemplary gene or splice site sequence"
caugugcguc

SEQ ID NO: 4904 - RNA, 10 nt, Unknown
  source: /note="Description of Unknown: Exemplary gene or splice site sequence"
auaguuggau

SEQ ID NO: 4905 - RNA, 10 nt, Unknown
  source: /note="Description of Unknown: Exemplary gene or splice site sequence"
gagguacgua

SEQ ID NO: 4906 - RNA, 10 nt, Unknown
  source: /note="Description of Unknown: Exemplary gene or splice site sequence"
guugugagaa

SEQ ID NO: 4907 - RNA, 10 nt, Unknown
  source: /note="Description of Unknown: Exemplary gene or splice site sequence"
caaguacauc

SEQ ID NO: 4908 - RNA, 10 nt, Unknown
  source: /note="Description of Unknown: Exemplary gene or splice site sequence"
gagguaguuu

SEQ ID NO: 4909 - RNA, 10 nt, Unknown
  source: /note="Description of Unknown: Exemplary gene or splice site sequence"
acuguacaga

SEQ ID NO: 4910 - RNA, 10 nt, Unknown
  source: /note="Description of Unknown: Exemplary gene or splice site sequence"
ccgguuguga

SEQ ID NO: 4911 - RNA, 10 nt, Unknown
  source: /note="Description of Unknown: Exemplary gene or splice site sequence"
ugggucagug

SEQ ID NO: 4912 - RNA, 10 nt, Unknown
  source: /note="Description of Unknown: Exemplary gene or splice site sequence"
guaguaagaa

SEQ ID NO: 4913 - RNA, 10 nt, Unknown
  source: /note="Description of Unknown: Exemplary gene or splice site sequence"
gacguacuuu

SEQ ID NO: 4914 - RNA, 10 nt, Unknown
  source: /note="Description of Unknown: Exemplary gene or splice site sequence"
agagucaguc

SEQ ID NO: 4915 - RNA, 10 nt, Unknown
  source: /note="Description of Unknown: Exemplary gene or splice site sequence"
uagguuaguu

SEQ ID NO: 4916 - RNA, 10 nt, Unknown
  source: /note="Description of Unknown: Exemplary gene or splice site sequence"
agggcagcag

SEQ ID NO: 4917 - RNA, 10 nt, Unknown
  source: /note="Description of Unknown: Exemplary gene or splice site sequence"
aagguccuac

SEQ ID NO: 4918 - RNA, 10 nt, Unknown
  source: /note="Description of Unknown: Exemplary gene or splice site sequence"
aauguaauug

SEQ ID NO: 4919 - RNA, 10 nt, Unknown
  source: /note="Description of Unknown: Exemplary gene or splice site sequence"
caggugcggg

SEQ ID NO: 4920 - RNA, 10 nt, Unknown
  source: /note="Description of Unknown: Exemplary gene or splice site sequence"
cugguaaugg

SEQ ID NO: 4921 - RNA, 10 nt, Unknown
  source: /note="Description of Unknown: Exemplary gene or splice site sequence"
caaguagccc

SEQ ID NO: 4922 - RNA, 10 nt, Unknown
  source: /note="Description of Unknown: Exemplary gene or splice site sequence"
gaagucaguu

SEQ ID NO: 4923 - RNA, 10 nt, Unknown
  source: /note="Description of Unknown: Exemplary gene or splice site sequence"
acaguaauug

SEQ ID NO: 4924 - RNA, 10 nt, Unknown
  source: /note="Description of Unknown: Exemplary gene or splice site sequence"
uuaguuagua

SEQ ID NO: 4925 - RNA, 10 nt, Unknown
  source: /note="Description of Unknown: Exemplary gene or splice site sequence"
ccuguauuuu

SEQ ID NO: 4926 - RNA, 10 nt, Unknown
  source: /note="Description of Unknown: Exemplary gene or splice site sequence"
aucguaagaa

SEQ ID NO: 4927 - RNA, 10 nt, Unknown
  source: /note="Description of Unknown: Exemplary gene or splice site sequence"
ccagugagca

SEQ ID NO: 4928 - RNA, 10 nt, Unknown
  source: /note="Description of Unknown: Exemplary gene or splice site sequence"
gaaguaaggc

SEQ ID NO: 4929 - RNA, 10 nt, Unknown
  source: /note="Description of Unknown: Exemplary gene or splice site sequence"
ugagugggua

SEQ ID NO: 4930 - RNA, 10 nt, Unknown
  source: /note="Description of Unknown: Exemplary gene or splice site sequence"
ucagugguag

SEQ ID NO: 4931 - RNA, 10 nt, Unknown
  source: /note="Description of Unknown: Exemplary gene or splice site sequence"
ucuguacagg

SEQ ID NO: 4932 - RNA, 10 nt, Unknown
  source: /note="Description of Unknown: Exemplary gene or splice site sequence"
cgagugagug

SEQ ID NO: 4933 - RNA, 10 nt, Unknown
  source: /note="Description of Unknown: Exemplary gene or splice site sequence"
uccguaugug

SEQ ID NO: 4934 - RNA, 10 nt, Unknown
  source: /note="Description of Unknown: Exemplary gene or splice site sequence"
caugccguuu

SEQ ID NO: 4935 - RNA, 10 nt, Unknown
  source: /note="Description of Unknown: Exemplary gene or splice site sequence"
aaagugacuu

SEQ ID NO: 4936 - RNA, 10 nt, Unknown
  source: /note="Description of Unknown: Exemplary gene or splice site sequence"
agaguaggca

SEQ ID NO: 4937 - RNA, 10 nt, Unknown
  source: /note="Description of Unknown: Exemplary gene or splice site sequence"
gaaguaagag

SEQ ID NO: 4938 - RNA, 10 nt, Unknown
  source: /note="Description of Unknown: Exemplary gene or splice site sequence"
caggcagguu

SEQ ID NO: 4939 - RNA, 10 nt, Unknown
  source: /note="Description of Unknown: Exemplary gene or splice site sequence"
uugguagagc

SEQ ID NO: 4940 - RNA, 10 nt, Unknown
  source: /note="Description of Unknown: Exemplary gene or splice site sequence"
aagguggaaa

SEQ ID NO: 4941 - RNA, 10 nt, Unknown
  source: /note="Description of Unknown: Exemplary gene or splice site sequence"
gaggcagguc

SEQ ID NO: 4942 - RNA, 10 nt, Unknown
  source: /note="Description of Unknown: Exemplary gene or splice site sequence"
augguacgac

SEQ ID NO: 4943 - RNA, 10 nt, Unknown
  source: /note="Description of Unknown: Exemplary gene or splice site sequence"
aggguaggaa

SEQ ID NO: 4944 - RNA, 10 nt, Unknown
  source: /note="Description of Unknown: Exemplary gene or splice site sequence"
aggguaggua

SEQ ID NO: 4945 - RNA, 10 nt, Unknown
  source: /note="Description of Unknown: Exemplary gene or splice site sequence"
uugguaaggu

SEQ ID NO: 4946 - RNA, 10 nt, Unknown
  source: /note="Description of Unknown: Exemplary gene or splice site sequence"
augguacaga

SEQ ID NO: 4947 - RNA, 10 nt, Unknown
  source: /note="Description of Unknown: Exemplary gene or splice site sequence"
cagguagagc

SEQ ID NO: 4948 - RNA, 10 nt, Unknown
  source: /note="Description of Unknown: Exemplary gene or splice site sequence"
uagguaaggu

SEQ ID NO: 4949 - RNA, 10 nt, Unknown
  source: /note="Description of Unknown: Exemplary gene or splice site sequence"
gggguuagag

SEQ ID NO: 4950 - RNA, 10 nt, Unknown
  source: /note="Description of Unknown: Exemplary gene or splice site sequence"
aagguaucaa

SEQ ID NO: 4951 - RNA, 10 nt, Unknown
  source: /note="Description of Unknown: Exemplary gene or splice site sequence"
gagguagccc

SEQ ID NO: 4952 - RNA, 10 nt, Unknown
  source: /note="Description of Unknown: Exemplary gene or splice site sequence"
caggugccuc

SEQ ID NO: 4953 - RNA, 10 nt, Unknown
  source: /note="Description of Unknown: Exemplary gene or splice site sequence"
gcaguaagag

SEQ ID NO: 4954 - RNA, 10 nt, Unknown
  source: /note="Description of Unknown: Exemplary gene or splice site sequence"
acgguagagu

SEQ ID NO: 4955 - RNA, 10 nt, Unknown
  source: /note="Description of Unknown: Exemplary gene or splice site sequence"
uggguaaugg

SEQ ID NO: 4956 - RNA, 10 nt, Unknown
  source: /note="Description of Unknown: Exemplary gene or splice site sequence"
cuggucaguu

SEQ ID NO: 4957 - RNA, 10 nt, Unknown
  source: /note="Description of Unknown: Exemplary gene or splice site sequence"
gugguacauu

SEQ ID NO: 4958 - RNA, 10 nt, Unknown
  source: /note="Description of Unknown: Exemplary gene or splice site sequence"
aaaguagguu

SEQ ID NO: 4959 - RNA, 10 nt, Unknown
  source: /note="Description of Unknown: Exemplary gene or splice site sequence"
aaggccaaga

SEQ ID NO: 4960 - RNA, 10 nt, Unknown
  source: /note="Description of Unknown: Exemplary gene or splice site sequence"
cgggugggca

SEQ ID NO: 4961 - RNA, 10 nt, Unknown
  source: /note="Description of Unknown: Exemplary gene or splice site sequence"
acgguccggg

SEQ ID NO: 4962 - RNA, 10 nt, Unknown
  source: /note="Description of Unknown: Exemplary gene or splice site sequence"
cgaguaugag

SEQ ID NO: 4963 - RNA, 10 nt, Unknown
  source: /note="Description of Unknown: Exemplary gene or splice site sequence"
cugguaugcc

SEQ ID NO: 4964 - RNA, 10 nt, Unknown
  source: /note="Description of Unknown: Exemplary gene or splice site sequence"
gagguggaug

SEQ ID NO: 4965 - RNA, 10 nt, Unknown
  source: /note="Description of Unknown: Exemplary gene or splice site sequence"
caggccuuuc

SEQ ID NO: 4966 - RNA, 10 nt, Unknown
  source: /note="Description of Unknown: Exemplary gene or splice site sequence"
aaaguacauc

SEQ ID NO: 4967 - RNA, 10 nt, Unknown
  source: /note="Description of Unknown: Exemplary gene or splice site sequence"
aaaguaauca

SEQ ID NO: 4968 - RNA, 10 nt, Unknown
  source: /note="Description of Unknown: Exemplary gene or splice site sequence"
gagguaacug

SEQ ID NO: 4969 - RNA, 10 nt, Unknown
  source: /note="Description of Unknown: Exemplary gene or splice site sequence"
cugguaaaga

SEQ ID NO: 4970 - RNA, 10 nt, Unknown
  source: /note="Description of Unknown: Exemplary gene or splice site sequence"
cguguaagca

SEQ ID NO: 4971 - RNA, 10 nt, Unknown
  source: /note="Description of Unknown: Exemplary gene or splice site sequence"
ugggcaagua

SEQ ID NO: 4972 - RNA, 10 nt, Unknown
  source: /note="Description of Unknown: Exemplary gene or splice site sequence"
gcgguggcga

SEQ ID NO: 4973 - RNA, 10 nt, Unknown
  source: /note="Description of Unknown: Exemplary gene or splice site sequence"
gagguggccg

SEQ ID NO: 4974 - RNA, 10 nt, Unknown
  source: /note="Description of Unknown: Exemplary gene or splice site sequence"
auugcaugca

SEQ ID NO: 4975 - RNA, 10 nt, Unknown
  source: /note="Description of Unknown: Exemplary gene or splice site sequence"
acggugacug

SEQ ID NO: 4976 - RNA, 10 nt, Unknown
  source: /note="Description of Unknown: Exemplary gene or splice site sequence"
caggucagau

SEQ ID NO: 4977 - RNA, 10 nt, Unknown
  source: /note="Description of Unknown: Exemplary gene or splice site sequence"
agaguaacuc

SEQ ID NO: 4978 - RNA, 10 nt, Unknown
  source: /note="Description of Unknown: Exemplary gene or splice site sequence"
ugaguaacag

SEQ ID NO: 4979 - RNA, 10 nt, Unknown
  source: /note="Description of Unknown: Exemplary gene or splice site sequence"
aagguacccg

SEQ ID NO: 4980 - RNA, 10 nt, Unknown
  source: /note="Description of Unknown: Exemplary gene or splice site sequence"
aggguaggcu

SEQ ID NO: 4981 - RNA, 10 nt, Unknown
  source: /note="Description of Unknown: Exemplary gene or splice site sequence"
ggggcaggac

SEQ ID NO: 4982 - RNA, 10 nt, Unknown
  source: /note="Description of Unknown: Exemplary gene or splice site sequence"
ccuguaagug

SEQ ID NO: 4983 - RNA, 10 nt, Unknown
  source: /note="Description of Unknown: Exemplary gene or splice site sequence"
auuguaagug

SEQ ID NO: 4984 - RNA, 10 nt, Unknown
  source: /note="Description of Unknown: Exemplary gene or splice site sequence"
acuguacgag

SEQ ID NO: 4985 - RNA, 10 nt, Unknown
  source: /note="Description of Unknown: Exemplary gene or splice site sequence"
guaguagugu

SEQ ID NO: 4986 - RNA, 10 nt, Unknown
  source: /note="Description of Unknown: Exemplary gene or splice site sequence"
agaguaugag

SEQ ID NO: 4987 - RNA, 10 nt, Unknown
  source: /note="Description of Unknown: Exemplary gene or splice site sequence"
ucaguguggg

SEQ ID NO: 4988 - RNA, 10 nt, Unknown
  source: /note="Description of Unknown: Exemplary gene or splice site sequence"
uggguauaua

SEQ ID NO: 4989 - RNA, 10 nt, Unknown
  source: /note="Description of Unknown: Exemplary gene or splice site sequence"
uagguagcua

SEQ ID NO: 4990 - RNA, 10 nt, Unknown
  source: /note="Description of Unknown: Exemplary gene or splice site sequence"
gggguaaaga

SEQ ID NO: 4991 - RNA, 10 nt, Unknown
  source: /note="Description of Unknown: Exemplary gene or splice site sequence"
aggguuacuu

SEQ ID NO: 4992 - RNA, 10 nt, Unknown
  source: /note="Description of Unknown: Exemplary gene or splice site sequence"
cauguaaaug

SEQ ID NO: 4993 - RNA, 10 nt, Unknown
  source: /note="Description of Unknown: Exemplary gene or splice site sequence"
ggaguaguaa

SEQ ID NO: 4994 - RNA, 10 nt, Unknown
  source: /note="Description of Unknown: Exemplary gene or splice site sequence"
caggucaauc

SEQ ID NO: 4995 - RNA, 10 nt, Unknown
  source: /note="Description of Unknown: Exemplary gene or splice site sequence"
cggguuagug

SEQ ID NO: 4996 - RNA, 10 nt, Unknown
  source: /note="Description of Unknown: Exemplary gene or splice site sequence"
uagguacaug

SEQ ID NO: 4997 - RNA, 10 nt, Unknown
  source: /note="Description of Unknown: Exemplary gene or splice site sequence"
uagguuaaga

SEQ ID NO: 4998 - RNA, 10 nt, Unknown
  source: /note="Description of Unknown: Exemplary gene or splice site sequence"
uggguaccuu

SEQ ID NO: 4999 - RNA, 10 nt, Unknown
  source: /note="Description of Unknown: Exemplary gene or splice site sequence"
cggguggaca

SEQ ID NO: 5000 - RNA, 10 nt, Unknown
  source: /note="Description of Unknown: Exemplary gene or splice site sequence"
caggucuuac

SEQ ID NO: 5001 - RNA, 10 nt, Unknown
  source: /note="Description of Unknown: Exemplary gene or splice site sequence"
aagguggagc

SEQ ID NO: 5002 - RNA, 10 nt, Unknown
  source: /note="Description of Unknown: Exemplary gene or splice site sequence"
augguaacca

SEQ ID NO: 5003 - RNA, 10 nt, Unknown
  source: /note="Description of Unknown: Exemplary gene or splice site sequence"
ucgguaaguu

SEQ ID NO: 5004 - RNA, 10 nt, Unknown
  source: /note="Description of Unknown: Exemplary gene or splice site sequence"
uauguacaaa

SEQ ID NO: 5005 - RNA, 10 nt, Unknown
  source: /note="Description of Unknown: Exemplary gene or splice site sequence"
aauguagauu

SEQ ID NO: 5006 - RNA, 10 nt, Unknown
  source: /note="Description of Unknown: Exemplary gene or splice site sequence"
guagcuagua

SEQ ID NO: 5007 - RNA, 10 nt, Unknown
  source: /note="Description of Unknown: Exemplary gene or splice site sequence"
aagguauugg

SEQ ID NO: 5008 - RNA, 10 nt, Unknown
  source: /note="Description of Unknown: Exemplary gene or splice site sequence"
gaggucuuug

SEQ ID NO: 5009 - RNA, 10 nt, Unknown
  source: /note="Description of Unknown: Exemplary gene or splice site sequence"
gaaguucagg

SEQ ID NO: 5010 - RNA, 10 nt, Unknown
  source: /note="Description of Unknown: Exemplary gene or splice site sequence"
uggguaucac

SEQ ID NO: 5011 - RNA, 10 nt, Unknown
  source: /note="Description of Unknown: Exemplary gene or splice site sequence"
agaguacugg

SEQ ID NO: 5012 - RNA, 10 nt, Unknown
  source: /note="Description of Unknown: Exemplary gene or splice site sequence"
cagguuaaug

SEQ ID NO: 5013 - RNA, 10 nt, Unknown
  source: /note="Description of Unknown: Exemplary gene or splice site sequence"
aggguacgug

SEQ ID NO: 5014 - RNA, 10 nt, Unknown
  source: /note="Description of Unknown: Exemplary gene or splice site sequence"
agggcacagg

SEQ ID NO: 5015 - RNA, 10 nt, Unknown
  source: /note="Description of Unknown: Exemplary gene or splice site sequence"
cugguuaguu

SEQ ID NO: 5016 - RNA, 10 nt, Unknown
  source: /note="Description of Unknown: Exemplary gene or splice site sequence"
uugguacgag

SEQ ID NO: 5017 - RNA, 10 nt, Unknown
  source: /note="Description of Unknown: Exemplary gene or splice site sequence"
acggugauca

SEQ ID NO: 5018 - RNA, 10 nt, Unknown
  source: /note="Description of Unknown: Exemplary gene or splice site sequence"
ccugugagag

SEQ ID NO: 5019 - RNA, 10 nt, Unknown
  source: /note="Description of Unknown: Exemplary gene or splice site sequence"
gaggugaagu

SEQ ID NO: 5020 - RNA, 10 nt, Unknown
  source: /note="Description of Unknown: Exemplary gene or splice site sequence"
aagguacauc

SEQ ID NO: 5021 - RNA, 10 nt, Unknown
  source: /note="Description of Unknown: Exemplary gene or splice site sequence"
ucuguaugug

SEQ ID NO: 5022 - RNA, 10 nt, Unknown
  source: /note="Description of Unknown: Exemplary gene or splice site sequence"
uugguggaag

SEQ ID NO: 5023 - RNA, 10 nt, Unknown
  source: /note="Description of Unknown: Exemplary gene or splice site sequence"
ugggcagguu

SEQ ID NO: 5024 - RNA, 10 nt, Unknown
  source: /note="Description of Unknown: Exemplary gene or splice site sequence"
gaaguggagc

SEQ ID NO: 5025 - RNA, 10 nt, Unknown
  source: /note="Description of Unknown: Exemplary gene or splice site sequence"
acaguaagac

SEQ ID NO: 5026 - RNA, 10 nt, Unknown
  source: /note="Description of Unknown: Exemplary gene or splice site sequence"
cggguaccaa

SEQ ID NO: 5027 - RNA, 10 nt, Unknown
  source: /note="Description of Unknown: Exemplary gene or splice site sequence"
caaguacguc

SEQ ID NO: 5028 - RNA, 10 nt, Unknown
  source: /note="Description of Unknown: Exemplary gene or splice site sequence"
agagugaggg

SEQ ID NO: 5029 - RNA, 10 nt, Unknown
  source: /note="Description of Unknown: Exemplary gene or splice site sequence"
cggguaagaa

SEQ ID NO: 5030 - RNA, 10 nt, Unknown
  source: /note="Description of Unknown: Exemplary gene or splice site sequence"
aauguaggug

SEQ ID NO: 5031 - RNA, 10 nt, Unknown
  source: /note="Description of Unknown: Exemplary gene or splice site sequence"
aucgugugcu

SEQ ID NO: 5032 - RNA, 10 nt, Unknown
  source: /note="Description of Unknown: Exemplary gene or splice site sequence"
uaggucaugg

SEQ ID NO: 5033 - RNA, 10 nt, Unknown
  source: /note="Description of Unknown: Exemplary gene or splice site sequence"
cagguuuuga

SEQ ID NO: 5034 - RNA, 10 nt, Unknown
  source: /note="Description of Unknown: Exemplary gene or splice site sequence"
aaggcaugca

SEQ ID NO: 5035 - RNA, 10 nt, Unknown
  source: /note="Description of Unknown: Exemplary gene or splice site sequence"
gaggugcugc

SEQ ID NO: 5036 - RNA, 10 nt, Unknown
  source: /note="Description of Unknown: Exemplary gene or splice site sequence"
aagguuaaua

SEQ ID NO: 5037 - RNA, 10 nt, Unknown
  source: /note="Description of Unknown: Exemplary gene or splice site sequence"
cagguucauc

SEQ ID NO: 5038 - RNA, 10 nt, Unknown
  source: /note="Description of Unknown: Exemplary gene or splice site sequence"
gcgguaggug

SEQ ID NO: 5039 - RNA, 10 nt, Unknown
  source: /note="Description of Unknown: Exemplary gene or splice site sequence"
gacgugagua

SEQ ID NO: 5040 - RNA, 10 nt, Unknown
  source: /note="Description of Unknown: Exemplary gene or splice site sequence"
caggucuacu

SEQ ID NO: 5041 - RNA, 10 nt, Unknown
  source: /note="Description of Unknown: Exemplary gene or splice site sequence"
uugguaugag

SEQ ID NO: 5042 - RNA, 10 nt, Unknown
  source: /note="Description of Unknown: Exemplary gene or splice site sequence"
agcgugggca

SEQ ID NO: 5043 - RNA, 10 nt, Unknown
  source: /note="Description of Unknown: Exemplary gene or splice site sequence"
augguaaggu

SEQ ID NO: 5044 - RNA, 10 nt, Unknown
  source: /note="Description of Unknown: Exemplary gene or splice site sequence"
augguaccuc

SEQ ID NO: 5045 - RNA, 10 nt, Unknown
  source: /note="Description of Unknown: Exemplary gene or splice site sequence"
uugguauggu

SEQ ID NO: 5046 - RNA, 10 nt, Unknown
  source: /note="Description of Unknown: Exemplary gene or splice site sequence"
uauguaugaa

SEQ ID NO: 5047 - RNA, 10 nt, Unknown
  source: /note="Description of Unknown: Exemplary gene or splice site sequence"
uggguauggg

SEQ ID NO: 5048 - RNA, 10 nt, Unknown
  source: /note="Description of Unknown: Exemplary gene or splice site sequence"
gauguaaaua

SEQ ID NO: 5049 - RNA, 10 nt, Unknown
  source: /note="Description of Unknown: Exemplary gene or splice site sequence"
ccgguaaguu

SEQ ID NO: 5050 - RNA, 10 nt, Unknown
  source: /note="Description of Unknown: Exemplary gene or splice site sequence"
gaggucugaa

SEQ ID NO: 5051 - RNA, 10 nt, Unknown
  source: /note="Description of Unknown: Exemplary gene or splice site sequence"
gaggugcgag

SEQ ID NO: 5052 - RNA, 10 nt, Unknown
  source: /note="Description of Unknown: Exemplary gene or splice site sequence"
cuggucagcc

SEQ ID NO: 5053 - RNA, 10 nt, Unknown
  source: /note="Description of Unknown: Exemplary gene or splice site sequence"
cagguuuugu

SEQ ID NO: 5054 - RNA, 10 nt, Unknown
  source: /note="Description of Unknown: Exemplary gene or splice site sequence"
cggguggugu

SEQ ID NO: 5055 - RNA, 10 nt, Unknown
  source: /note="Description of Unknown: Exemplary gene or splice site sequence"
uaaguuagua

SEQ ID NO: 5056 - RNA, 10 nt, Unknown
  source: /note="Description of Unknown: Exemplary gene or splice site sequence"
uuugugugug

SEQ ID NO: 5057 - RNA, 10 nt, Unknown
  source: /note="Description of Unknown: Exemplary gene or splice site sequence"
cagguuaacc

SEQ ID NO: 5058 - RNA, 10 nt, Unknown
  source: /note="Description of Unknown: Exemplary gene or splice site sequence"
uugguacuuu

SEQ ID NO: 5059 - RNA, 10 nt, Unknown
  source: /note="Description of Unknown: Exemplary gene or splice site sequence"
gcuguaaggc

SEQ ID NO: 5060 - RNA, 10 nt, Unknown
  source: /note="Description of Unknown: Exemplary gene or splice site sequence"
aggguggcug

SEQ ID NO: 5061 - RNA, 10 nt, Unknown
  source: /note="Description of Unknown: Exemplary gene or splice site sequence"
gauguaaaaa

SEQ ID NO: 5062 - RNA, 10 nt, Unknown
  source: /note="Description of Unknown: Exemplary gene or splice site sequence"
aaggucaaaa

SEQ ID NO: 5063 - RNA, 10 nt, Unknown
  source: /note="Description of Unknown: Exemplary gene or splice site sequence"
cagguagcgc

SEQ ID NO: 5064 - RNA, 10 nt, Unknown
  source: /note="Description of Unknown: Exemplary gene or splice site sequence"
cagguuuggc

SEQ ID NO: 5065 - RNA, 10 nt, Unknown
  source: /note="Description of Unknown: Exemplary gene or splice site sequence"
gaggugguuu

SEQ ID NO: 5066 - RNA, 10 nt, Unknown
  source: /note="Description of Unknown: Exemplary gene or splice site sequence"
cggguaaaua

SEQ ID NO: 5067 - RNA, 10 nt, Unknown
  source: /note="Description of Unknown: Exemplary gene or splice site sequence"
cugguucggu

SEQ ID NO: 5068 - RNA, 10 nt, Unknown
  source: /note="Description of Unknown: Exemplary gene or splice site sequence"
ggagugagcc

SEQ ID NO: 5069 - RNA, 10 nt, Unknown
  source: /note="Description of Unknown: Exemplary gene or splice site sequence"
aaggugcgcg

SEQ ID NO: 5070 - RNA, 10 nt, Unknown
  source: /note="Description of Unknown: Exemplary gene or splice site sequence"
gaaguacauc

SEQ ID NO: 5071 - RNA, 10 nt, Unknown
  source: /note="Description of Unknown: Exemplary gene or splice site sequence"
agugucugua

SEQ ID NO: 5072 - RNA, 10 nt, Unknown
  source: /note="Description of Unknown: Exemplary gene or splice site sequence"
cccgugagcu

SEQ ID NO: 5073 - RNA, 10 nt, Unknown
  source: /note="Description of Unknown: Exemplary gene or splice site sequence"
gagguucaca

SEQ ID NO: 5074 - RNA, 10 nt, Unknown
  source: /note="Description of Unknown: Exemplary gene or splice site sequence"
cuagugggua

SEQ ID NO: 5075 - RNA, 10 nt, Unknown
  source: /note="Description of Unknown: Exemplary gene or splice site sequence"
gagguaacua

SEQ ID NO: 5076 - RNA, 10 nt, Unknown
  source: /note="Description of Unknown: Exemplary gene or splice site sequence"
ucgguauguc

SEQ ID NO: 5077 - RNA, 10 nt, Unknown
  source: /note="Description of Unknown: Exemplary gene or splice site sequence"
uaaguauuug

SEQ ID NO: 5078 - RNA, 10 nt, Unknown
  source: /note="Description of Unknown: Exemplary gene or splice site sequence"
cagguaagcg

SEQ ID NO: 5079 - RNA, 10 nt, Unknown
  source: /note="Description of Unknown: Exemplary gene or splice site sequence"
gaggugguaa

SEQ ID NO: 5080 - RNA, 10 nt, Unknown
  source: /note="Description of Unknown: Exemplary gene or splice site sequence"
cgaguaagag

SEQ ID NO: 5081 - RNA, 10 nt, Unknown
  source: /note="Description of Unknown: Exemplary gene or splice site sequence"
ccgguaagcu

SEQ ID NO: 5082 - RNA, 10 nt, Unknown
  source: /note="Description of Unknown: Exemplary gene or splice site sequence"
gaggucuugu

SEQ ID NO: 5083 - RNA, 10 nt, Unknown
  source: /note="Description of Unknown: Exemplary gene or splice site sequence"
aagguggguc

SEQ ID NO: 5084 - RNA, 10 nt, Unknown
  source: /note="Description of Unknown: Exemplary gene or splice site sequence"
cacguaagug

SEQ ID NO: 5085 - RNA, 10 nt, Unknown
  source: /note="Description of Unknown: Exemplary gene or splice site sequence"
aguguaauga

SEQ ID NO: 5086 - RNA, 10 nt, Unknown
  source: /note="Description of Unknown: Exemplary gene or splice site sequence"
aaagugugua

SEQ ID NO: 5087 - RNA, 10 nt, Unknown
  source: /note="Description of Unknown: Exemplary gene or splice site sequence"
ggagugccaa

SEQ ID NO: 5088 - RNA, 10 nt, Unknown
  source: /note="Description of Unknown: Exemplary gene or splice site sequence"
cacgugaguu

SEQ ID NO: 5089 - RNA, 10 nt, Unknown
  source: /note="Description of Unknown: Exemplary gene or splice site sequence"
aagguuggau

SEQ ID NO: 5090 - RNA, 10 nt, Unknown
  source: /note="Description of Unknown: Exemplary gene or splice site sequence"
uauguaaaua

SEQ ID NO: 5091 - RNA, 10 nt, Unknown
  source: /note="Description of Unknown: Exemplary gene or splice site sequence"
cugguaggaa

SEQ ID NO: 5092 - RNA, 10 nt, Unknown
  source: /note="Description of Unknown: Exemplary gene or splice site sequence"
uauguaaacu

SEQ ID NO: 5093 - RNA, 10 nt, Unknown
  source: /note="Description of Unknown: Exemplary gene or splice site sequence"
aauguauuuu

SEQ ID NO: 5094 - RNA, 10 nt, Unknown
  source: /note="Description of Unknown: Exemplary gene or splice site sequence"
cuggcaagug

SEQ ID NO: 5095 - RNA, 10 nt, Unknown
  source: /note="Description of Unknown: Exemplary gene or splice site sequence"
ugugugguau

SEQ ID NO: 5096 - RNA, 10 nt, Unknown
  source: /note="Description of Unknown: Exemplary gene or splice site sequence"
uauguauguu

SEQ ID NO: 5097 - RNA, 10 nt, Unknown
  source: /note="Description of Unknown: Exemplary gene or splice site sequence"
uuggugacuc

SEQ ID NO: 5098 - RNA, 10 nt, Unknown
  source: /note="Description of Unknown: Exemplary gene or splice site sequence"
ggaguaaggu

SEQ ID NO: 5099 - RNA, 10 nt, Unknown
  source: /note="Description of Unknown: Exemplary gene or splice site sequence"
aagguagaug

SEQ ID NO: 5100 - RNA, 10 nt, Unknown
  source: /note="Description of Unknown: Exemplary gene or splice site sequence"
uggguagggu

SEQ ID NO: 5101 - RNA, 10 nt, Unknown
  source: /note="Description of Unknown: Exemplary gene or splice site sequence"
aauguaauuc

SEQ ID NO: 5102 - RNA, 10 nt, Unknown
  source: /note="Description of Unknown: Exemplary gene or splice site sequence"
gugguauggc

SEQ ID NO: 5103 - RNA, 10 nt, Unknown
  source: /note="Description of Unknown: Exemplary gene or splice site sequence"
ggaguggguu

SEQ ID NO: 5104 - RNA, 10 nt, Unknown
  source: /note="Description of Unknown: Exemplary gene or splice site sequence"
aggguaccac

SEQ ID NO: 5105 - RNA, 10 nt, Unknown
  source: /note="Description of Unknown: Exemplary gene or splice site sequence"
uaggugacag

SEQ ID NO: 5106 - RNA, 10 nt, Unknown
  source: /note="Description of Unknown: Exemplary gene or splice site sequence"
acaguaggca

SEQ ID NO: 5107 - RNA, 10 nt, Unknown
  source: /note="Description of Unknown: Exemplary gene or splice site sequence"
augguuugaa

SEQ ID NO: 5108 - RNA, 10 nt, Unknown
  source: /note="Description of Unknown: Exemplary gene or splice site sequence"
gcaguaacua

SEQ ID NO: 5109 - RNA, 10 nt, Unknown
  source: /note="Description of Unknown: Exemplary gene or splice site sequence"
ccgguaggua

SEQ ID NO: 5110 - RNA, 10 nt, Unknown
  source: /note="Description of Unknown: Exemplary gene or splice site sequence"
agaguaggcc

SEQ ID NO: 5111 - RNA, 10 nt, Unknown
  source: /note="Description of Unknown: Exemplary gene or splice site sequence"
aagguugaca

SEQ ID NO: 5112 - RNA, 10 nt, Unknown
  source: /note="Description of Unknown: Exemplary gene or splice site sequence"
cuggugugua

SEQ ID NO: 5113 - RNA, 10 nt, Unknown
  source: /note="Description of Unknown: Exemplary gene or splice site sequence"
gaagucuguc

SEQ ID NO: 5114 - RNA, 10 nt, Unknown
  source: /note="Description of Unknown: Exemplary gene or splice site sequence"
ugggcucgga

SEQ ID NO: 5115 - RNA, 10 nt, Unknown
  source: /note="Description of Unknown: Exemplary gene or splice site sequence"
cagguagccu

SEQ ID NO: 5116 - RNA, 10 nt, Unknown
  source: /note="Description of Unknown: Exemplary gene or splice site sequence"
agaguaggua

SEQ ID NO: 5117 - RNA, 10 nt, Unknown
  source: /note="Description of Unknown: Exemplary gene or splice site sequence"
uaaguauguc

SEQ ID NO: 5118 - RNA, 10 nt, Unknown
  source: /note="Description of Unknown: Exemplary gene or splice site sequence"
cugguauauc

SEQ ID NO: 5119 - RNA, 10 nt, Unknown
  source: /note="Description of Unknown: Exemplary gene or splice site sequence"
gagguguguu

SEQ ID NO: 5120 - RNA, 10 nt, Unknown
  source: /note="Description of Unknown: Exemplary gene or splice site sequence"
auggugcaug

SEQ ID NO: 5121 - RNA, 10 nt, Unknown
  source: /note="Description of Unknown: Exemplary gene or splice site sequence"
aagguacgcc

SEQ ID NO: 5122 - RNA, 10 nt, Unknown
  source: /note="Description of Unknown: Exemplary gene or splice site sequence"
ugaguaacua

SEQ ID NO: 5123 - RNA, 10 nt, Unknown
  source: /note="Description of Unknown: Exemplary gene or splice site sequence"
gaggugacag

SEQ ID NO: 5124 - RNA, 10 nt, Unknown
  source: /note="Description of Unknown: Exemplary gene or splice site sequence"
guuguccugu

SEQ ID NO: 5125 - RNA, 10 nt, Unknown
  source: /note="Description of Unknown: Exemplary gene or splice site sequence"
uuggugucuu

SEQ ID NO: 5126 - RNA, 10 nt, Unknown
  source: /note="Description of Unknown: Exemplary gene or splice site sequence"
aaugugaagg

SEQ ID NO: 5127 - RNA, 10 nt, Unknown
  source: /note="Description of Unknown: Exemplary gene or splice site sequence"
uugguggaua

SEQ ID NO: 5128 - RNA, 10 nt, Unknown
  source: /note="Description of Unknown: Exemplary gene or splice site sequence"
uagguguguu

SEQ ID NO: 5129 - RNA, 10 nt, Unknown
  source: /note="Description of Unknown: Exemplary gene or splice site sequence"
cuggcaaguu

SEQ ID NO: 5130 - RNA, 10 nt, Unknown
  source: /note="Description of Unknown: Exemplary gene or splice site sequence"
gcaguaagau

SEQ ID NO: 5131 - RNA, 10 nt, Unknown
  source: /note="Description of Unknown: Exemplary gene or splice site sequence"
gcgguggaaa

SEQ ID NO: 5132 - RNA, 10 nt, Unknown
  source: /note="Description of Unknown: Exemplary gene or splice site sequence"
ugcguccagc

SEQ ID NO: 5133 - RNA, 10 nt, Unknown
  source: /note="Description of Unknown: Exemplary gene or splice site sequence"
aaaguggagu

SEQ ID NO: 5134 - RNA, 10 nt, Unknown
  source: /note="Description of Unknown: Exemplary gene or splice site sequence"
cgugugagcc

SEQ ID NO: 5135 - RNA, 10 nt, Unknown
  source: /note="Description of Unknown: Exemplary gene or splice site sequence"
agaguacugu

SEQ ID NO: 5136 - RNA, 10 nt, Unknown
  source: /note="Description of Unknown: Exemplary gene or splice site sequence"
cagguauagc

SEQ ID NO: 5137 - RNA, 10 nt, Unknown
  source: /note="Description of Unknown: Exemplary gene or splice site sequence"
uacguaagga

SEQ ID NO: 5138 - RNA, 10 nt, Unknown
  source: /note="Description of Unknown: Exemplary gene or splice site sequence"
aaggucuuua

SEQ ID NO: 5139 - RNA, 10 nt, Unknown
  source: /note="Description of Unknown: Exemplary gene or splice site sequence"
aagguggucu

SEQ ID NO: 5140 - RNA, 10 nt, Unknown
  source: /note="Description of Unknown: Exemplary gene or splice site sequence"
gggguaaauu

SEQ ID NO: 5141 - RNA, 10 nt, Unknown
  source: /note="Description of Unknown: Exemplary gene or splice site sequence"
ucagugagga

SEQ ID NO: 5142 - RNA, 10 nt, Unknown
  source: /note="Description of Unknown: Exemplary gene or splice site sequence"
agaguacguu

SEQ ID NO: 5143 - RNA, 10 nt, Unknown
  source: /note="Description of Unknown: Exemplary gene or splice site sequence"
gaggucguca

SEQ ID NO: 5144 - RNA, 10 nt, Unknown
  source: /note="Description of Unknown: Exemplary gene or splice site sequence"
uagguuugau

SEQ ID NO: 5145 - RNA, 10 nt, Unknown
  source: /note="Description of Unknown: Exemplary gene or splice site sequence"
cauguaaacc

SEQ ID NO: 5146 - RNA, 10 nt, Unknown
  source: /note="Description of Unknown: Exemplary gene or splice site sequence"
aagguggcac

SEQ ID NO: 5147 - RNA, 10 nt, Unknown
  source: /note="Description of Unknown: Exemplary gene or splice site sequence"
cagguagaug

SEQ ID NO: 5148 - RNA, 10 nt, Unknown
  source: /note="Description of Unknown: Exemplary gene or splice site sequence"
aacguaaaag

SEQ ID NO: 5149 - RNA, 10 nt, Unknown
  source: /note="Description of Unknown: Exemplary gene or splice site sequence"
uaggucucug

SEQ ID NO: 5150 - RNA, 10 nt, Unknown
  source: /note="Description of Unknown: Exemplary gene or splice site sequence"
auaguaggug

SEQ ID NO: 5151 - RNA, 10 nt, Unknown
  source: /note="Description of Unknown: Exemplary gene or splice site sequence"
uaggcaagag

SEQ ID NO: 5152 - RNA, 10 nt, Unknown
  source: /note="Description of Unknown: Exemplary gene or splice site sequence"
uaggcacggc

SEQ ID NO: 5153 - RNA, 10 nt, Unknown
  source: /note="Description of Unknown: Exemplary gene or splice site sequence"
aaggucuuca

SEQ ID NO: 5154 - RNA, 10 nt, Unknown
  source: /note="Description of Unknown: Exemplary gene or splice site sequence"
ccaguaugcu

SEQ ID NO: 5155 - RNA, 10 nt, Unknown
  source: /note="Description of Unknown: Exemplary gene or splice site sequence"
caagugaguu

SEQ ID NO: 5156 - RNA, 10 nt, Unknown
  source: /note="Description of Unknown: Exemplary gene or splice site sequence"
caggucucaa

SEQ ID NO: 5157 - RNA, 10 nt, Unknown
  source: /note="Description of Unknown: Exemplary gene or splice site sequence"
cagguuacau

SEQ ID NO: 5158 - RNA, 10 nt, Unknown
  source: /note="Description of Unknown: Exemplary gene or splice site sequence"
ggagugagca

SEQ ID NO: 5159 - RNA, 10 nt, Unknown
  source: /note="Description of Unknown: Exemplary gene or splice site sequence"
agaguacgca

SEQ ID NO: 5160 - RNA, 10 nt, Unknown
  source: /note="Description of Unknown: Exemplary gene or splice site sequence"
cugguguugg

SEQ ID NO: 5161 - RNA, 10 nt, Unknown
  source: /note="Description of Unknown: Exemplary gene or splice site sequence"
aagguacuca

SEQ ID NO: 5162 - RNA, 10 nt, Unknown
  source: /note="Description of Unknown: Exemplary gene or splice site sequence"
cuaguaaggg

SEQ ID NO: 5163 - RNA, 10 nt, Unknown
  source: /note="Description of Unknown: Exemplary gene or splice site sequence"
agaguaaaag

SEQ ID NO: 5164 - RNA, 10 nt, Unknown
  source: /note="Description of Unknown: Exemplary gene or splice site sequence"
aagguaacga

SEQ ID NO: 5165 - RNA, 10 nt, Unknown
  source: /note="Description of Unknown: Exemplary gene or splice site sequence"
cugguccccg

SEQ ID NO: 5166 - RNA, 10 nt, Unknown
  source: /note="Description of Unknown: Exemplary gene or splice site sequence"
uaaguauggg

SEQ ID NO: 5167 - RNA, 10 nt, Unknown
  source: /note="Description of Unknown: Exemplary gene or splice site sequence"
gaggucgagc

SEQ ID NO: 5168 - RNA, 10 nt, Unknown
  source: /note="Description of Unknown: Exemplary gene or splice site sequence"
uugguauaua

SEQ ID NO: 5169 - RNA, 10 nt, Unknown
  source: /note="Description of Unknown: Exemplary gene or splice site sequence"
aaagucaagg

SEQ ID NO: 5170 - RNA, 10 nt, Unknown
  source: /note="Description of Unknown: Exemplary gene or splice site sequence"
aaggucuagg

SEQ ID NO: 5171 - RNA, 10 nt, Unknown
  source: /note="Description of Unknown: Exemplary gene or splice site sequence"
cgaguagguc

SEQ ID NO: 5172 - RNA, 10 nt, Unknown
  source: /note="Description of Unknown: Exemplary gene or splice site sequence"
aggguucguu

SEQ ID NO: 5173 - RNA, 10 nt, Unknown
  source: /note="Description of Unknown: Exemplary gene or splice site sequence"
gaggcaggcc

SEQ ID NO: 5174 - RNA, 10 nt, Unknown
  source: /note="Description of Unknown: Exemplary gene or splice site sequence"
cuaguauuac

SEQ ID NO: 5175 - RNA, 10 nt, Unknown
  source: /note="Description of Unknown: Exemplary gene or splice site sequence"
acgguaugug

SEQ ID NO: 5176 - RNA, 10 nt, Unknown
  source: /note="Description of Unknown: Exemplary gene or splice site sequence"
uaggugguuc

SEQ ID NO: 5177 - RNA, 10 nt, Unknown
  source: /note="Description of Unknown: Exemplary gene or splice site sequence"
agaguauaac

SEQ ID NO: 5178 - RNA, 10 nt, Unknown
  source: /note="Description of Unknown: Exemplary gene or splice site sequence"
uuggugcguc

SEQ ID NO: 5179 - RNA, 10 nt, Unknown
  source: /note="Description of Unknown: Exemplary gene or splice site sequence"
accguuaucu

SEQ ID NO: 5180 - RNA, 10 nt, Unknown
  source: /note="Description of Unknown: Exemplary gene or splice site sequence"
ccagugauga

SEQ ID NO: 5181 - RNA, 10 nt, Unknown
  source: /note="Description of Unknown: Exemplary gene or splice site sequence"
gaaguaugca

SEQ ID NO: 5182 - RNA, 10 nt, Unknown
  source: /note="Description of Unknown: Exemplary gene or splice site sequence"
gaaguauggc

SEQ ID NO: 5183 - RNA, 10 nt, Unknown
  source: /note="Description of Unknown: Exemplary gene or splice site sequence"
ccgguaggac

SEQ ID NO: 5184 - RNA, 10 nt, Unknown
  source: /note="Description of Unknown: Exemplary gene or splice site sequence"
aauguaagca

SEQ ID NO: 5185 - RNA, 10 nt, Unknown
  source: /note="Description of Unknown: Exemplary gene or splice site sequence"
agaguaauug

SEQ ID NO: 5186 - RNA, 10 nt, Unknown
  source: /note="Description of Unknown: Exemplary gene or splice site sequence"
aggguugguu

SEQ ID NO: 5187 - RNA, 10 nt, Unknown
  source: /note="Description of Unknown: Exemplary gene or splice site sequence"
gugguaggag

SEQ ID NO: 5188 - RNA, 10 nt, Unknown
  source: /note="Description of Unknown: Exemplary gene or splice site sequence"
aaggcaguuu

SEQ ID NO: 5189 - RNA, 10 nt, Unknown
  source: /note="Description of Unknown: Exemplary gene or splice site sequence"
caaguaagcc

SEQ ID NO: 5190 - RNA, 10 nt, Unknown
  source: /note="Description of Unknown: Exemplary gene or splice site sequence"
cuggcaagua

SEQ ID NO: 5191 - RNA, 10 nt, Unknown
  source: /note="Description of Unknown: Exemplary gene or splice site sequence"
caggcaugau

SEQ ID NO: 5192 - RNA, 10 nt, Unknown
  source: /note="Description of Unknown: Exemplary gene or splice site sequence"
aggguaauug

SEQ ID NO: 5193 - RNA, 10 nt, Unknown
  source: /note="Description of Unknown: Exemplary gene or splice site sequence"
gggguaaccu

SEQ ID NO: 5194 - RNA, 10 nt, Unknown
  source: /note="Description of Unknown: Exemplary gene or splice site sequence"
aaaguaacua

SEQ ID NO: 5195 - RNA, 10 nt, Unknown
  source: /note="Description of Unknown: Exemplary gene or splice site sequence"
uaggucugcc

SEQ ID NO: 5196 - RNA, 10 nt, Unknown
  source: /note="Description of Unknown: Exemplary gene or splice site sequence"
acgguaugaa

SEQ ID NO: 5197 - RNA, 10 nt, Unknown
  source: /note="Description of Unknown: Exemplary gene or splice site sequence"
aguguauggg

SEQ ID NO: 5198 - RNA, 10 nt, Unknown
  source: /note="Description of Unknown: Exemplary gene or splice site sequence"
uggguuggca

SEQ ID NO: 5199 - RNA, 10 nt, Unknown
  source: /note="Description of Unknown: Exemplary gene or splice site sequence"
uagguaaacu

SEQ ID NO: 5200 - RNA, 10 nt, Unknown
  source: /note="Description of Unknown: Exemplary gene or splice site sequence"
agagugggua

SEQ ID NO: 5201 - RNA, 10 nt, Unknown
  source: /note="Description of Unknown: Exemplary gene or splice site sequence"
agaguauuug

SEQ ID NO: 5202 - RNA, 10 nt, Unknown
  source: /note="Description of Unknown: Exemplary gene or splice site sequence"
aguguaggaa

SEQ ID NO: 5203 - RNA, 10 nt, Unknown
  source: /note="Description of Unknown: Exemplary gene or splice site sequence"
cuuguacgua

SEQ ID NO: 5204 - RNA, 10 nt, Unknown
  source: /note="Description of Unknown: Exemplary gene or splice site sequence"
gaugugagau

SEQ ID NO: 5205 - RNA, 10 nt, Unknown
  source: /note="Description of Unknown: Exemplary gene or splice site sequence"
caggcagcca

SEQ ID NO: 5206 - RNA, 10 nt, Unknown
  source: /note="Description of Unknown: Exemplary gene or splice site sequence"
aaggucacug

SEQ ID NO: 5207 - RNA, 10 nt, Unknown
  source: /note="Description of Unknown: Exemplary gene or splice site sequence"
aaggucugac

SEQ ID NO: 5208 - RNA, 10 nt, Unknown
  source: /note="Description of Unknown: Exemplary gene or splice site sequence"
uagguuccuu

SEQ ID NO: 5209 - RNA, 10 nt, Unknown
  source: /note="Description of Unknown: Exemplary gene or splice site sequence"
cuggugcuuu

SEQ ID NO: 5210 - RNA, 10 nt, Unknown
  source: /note="Description of Unknown: Exemplary gene or splice site sequence"
ugaguuggug

SEQ ID NO: 5211 - RNA, 10 nt, Unknown
  source: /note="Description of Unknown: Exemplary gene or splice site sequence"
uuggugggau

SEQ ID NO: 5212 - RNA, 10 nt, Unknown
  source: /note="Description of Unknown: Exemplary gene or splice site sequence"
ugaguagggu

SEQ ID NO: 5213 - RNA, 10 nt, Unknown
  source: /note="Description of Unknown: Exemplary gene or splice site sequence"
ucggugaggu

SEQ ID NO: 5214 - RNA, 10 nt, Unknown
  source: /note="Description of Unknown: Exemplary gene or splice site sequence"
aaaguaaaga

SEQ ID NO: 5215 - RNA, 10 nt, Unknown
  source: /note="Description of Unknown: Exemplary gene or splice site sequence"
aaggcaaguc

SEQ ID NO: 5216 - RNA, 10 nt, Unknown
  source: /note="Description of Unknown: Exemplary gene or splice site sequence"
cggguaaagc

SEQ ID NO: 5217 - RNA, 10 nt, Unknown
  source: /note="Description of Unknown: Exemplary gene or splice site sequence"
aaaguuaguu

SEQ ID NO: 5218 - RNA, 10 nt, Unknown
  source: /note="Description of Unknown: Exemplary gene or splice site sequence"
uuaguaagca

SEQ ID NO: 5219 - RNA, 10 nt, Unknown
  source: /note="Description of Unknown: Exemplary gene or splice site sequence"
gaggucacau

SEQ ID NO: 5220 - RNA, 10 nt, Unknown
  source: /note="Description of Unknown: Exemplary gene or splice site sequence"
uaagugguau

SEQ ID NO: 5221 - RNA, 10 nt, Unknown
  source: /note="Description of Unknown: Exemplary gene or splice site sequence"
uaggugcuuu

SEQ ID NO: 5222 - RNA, 10 nt, Unknown
  source: /note="Description of Unknown: Exemplary gene or splice site sequence"
ggaguaggca

SEQ ID NO: 5223 - RNA, 10 nt, Unknown
  source: /note="Description of Unknown: Exemplary gene or splice site sequence"
ugaguaagga

SEQ ID NO: 5224 - RNA, 10 nt, Unknown
  source: /note="Description of Unknown: Exemplary gene or splice site sequence"
cagguggagc

SEQ ID NO: 5225 - RNA, 10 nt, Unknown
  source: /note="Description of Unknown: Exemplary gene or splice site sequence"
gauguagaag

SEQ ID NO: 5226 - RNA, 10 nt, Unknown
  source: /note="Description of Unknown: Exemplary gene or splice site sequence"
aaugccugcc

SEQ ID NO: 5227 - RNA, 10 nt, Unknown
  source: /note="Description of Unknown: Exemplary gene or splice site sequence"
augguaaggc

SEQ ID NO: 5228 - RNA, 10 nt, Unknown
  source: /note="Description of Unknown: Exemplary gene or splice site sequence"
uggguaauau

SEQ ID NO: 5229 - RNA, 10 nt, Unknown
  source: /note="Description of Unknown: Exemplary gene or splice site sequence"
cugguaccuc

SEQ ID NO: 5230 - RNA, 10 nt, Unknown
  source: /note="Description of Unknown: Exemplary gene or splice site sequence"
cacgugagcc

SEQ ID NO: 5231 - RNA, 10 nt, Unknown
  source: /note="Description of Unknown: Exemplary gene or splice site sequence"
ugaguuugug

SEQ ID NO: 5232 - RNA, 10 nt, Unknown
  source: /note="Description of Unknown: Exemplary gene or splice site sequence"
ccgguagugu

SEQ ID NO: 5233 - RNA, 10 nt, Unknown
  source: /note="Description of Unknown: Exemplary gene or splice site sequence"
aaagugacaa

SEQ ID NO: 5234 - RNA, 10 nt, Unknown
  source: /note="Description of Unknown: Exemplary gene or splice site sequence"
gaaguggguu

SEQ ID NO: 5235 - RNA, 10 nt, Unknown
  source: /note="Description of Unknown: Exemplary gene or splice site sequence"
caggugcagc

SEQ ID NO: 5236 - RNA, 10 nt, Unknown
  source: /note="Description of Unknown: Exemplary gene or splice site sequence"
gaggugggcc

SEQ ID NO: 5237 - RNA, 10 nt, Unknown
  source: /note="Description of Unknown: Exemplary gene or splice site sequence"
uaugugcguc

SEQ ID NO: 5238 - RNA, 10 nt, Unknown
  source: /note="Description of Unknown: Exemplary gene or splice site sequence"
gggguacugg

SEQ ID NO: 5239 - RNA, 10 nt, Unknown
  source: /note="Description of Unknown: Exemplary gene or splice site sequence"
cugguagguu

SEQ ID NO: 5240 - RNA, 10 nt, Unknown
  source: /note="Description of Unknown: Exemplary gene or splice site sequence"
uuggcauguu

SEQ ID NO: 5241 - RNA, 10 nt, Unknown
  source: /note="Description of Unknown: Exemplary gene or splice site sequence"
aauguaauac

SEQ ID NO: 5242 - RNA, 10 nt, Unknown
  source: /note="Description of Unknown: Exemplary gene or splice site sequence"
uaggccggug

SEQ ID NO: 5243 - RNA, 10 nt, Unknown
  source: /note="Description of Unknown: Exemplary gene or splice site sequence"
agagucagua

SEQ ID NO: 5244 - RNA, 10 nt, Unknown
  source: /note="Description of Unknown: Exemplary gene or splice site sequence"
uaaguaaauc

SEQ ID NO: 5245 - RNA, 10 nt, Unknown
  source: /note="Description of Unknown: Exemplary gene or splice site sequence"
cagguuccuc

SEQ ID NO: 5246 - RNA, 10 nt, Unknown
  source: /note="Description of Unknown: Exemplary gene or splice site sequence"
uagguacgau

SEQ ID NO: 5247 - RNA, 10 nt, Unknown
  source: /note="Description of Unknown: Exemplary gene or splice site sequence"
agaguuagug

SEQ ID NO: 5248 - RNA, 10 nt, Unknown
  source: /note="Description of Unknown: Exemplary gene or splice site sequence"
gcaguaagug

SEQ ID NO: 5249 - RNA, 10 nt, Unknown
  source: /note="Description of Unknown: Exemplary gene or splice site sequence"
agggugguag

SEQ ID NO: 5250 - RNA, 10 nt, Unknown
  source: /note="Description of Unknown: Exemplary gene or splice site sequence"
ggaguaaugu

SEQ ID NO: 5251 - RNA, 10 nt, Unknown
  source: /note="Description of Unknown: Exemplary gene or splice site sequence"
gauguaaguc

SEQ ID NO: 5252 - RNA, 10 nt, Unknown
  source: /note="Description of Unknown: Exemplary gene or splice site sequence"
ccaguuucgu

SEQ ID NO: 5253 - RNA, 10 nt, Unknown
  source: /note="Description of Unknown: Exemplary gene or splice site sequence"
aagguucggg

SEQ ID NO: 5254 - RNA, 10 nt, Unknown
  source: /note="Description of Unknown: Exemplary gene or splice site sequence"
augguggagu

SEQ ID NO: 5255 - RNA, 10 nt, Unknown
  source: /note="Description of Unknown: Exemplary gene or splice site sequence"
aagguaccgg

SEQ ID NO: 5256 - RNA, 10 nt, Unknown
  source: /note="Description of Unknown: Exemplary gene or splice site sequence"
gaagugcgaa

SEQ ID NO: 5257 - RNA, 10 nt, Unknown
  source: /note="Description of Unknown: Exemplary gene or splice site sequence"
ugggucaguu

SEQ ID NO: 5258 - RNA, 10 nt, Unknown
  source: /note="Description of Unknown: Exemplary gene or splice site sequence"
aagguguaga

SEQ ID NO: 5259 - RNA, 10 nt, Unknown
  source: /note="Description of Unknown: Exemplary gene or splice site sequence"
uggguaggcc

SEQ ID NO: 5260 - RNA, 10 nt, Unknown
  source: /note="Description of Unknown: Exemplary gene or splice site sequence"
ccagugaguc

SEQ ID NO: 5261 - RNA, 10 nt, Unknown
  source: /note="Description of Unknown: Exemplary gene or splice site sequence"
aaggucacuu

SEQ ID NO: 5262 - RNA, 10 nt, Unknown
  source: /note="Description of Unknown: Exemplary gene or splice site sequence"
agcgugaggc

SEQ ID NO: 5263 - RNA, 10 nt, Unknown
  source: /note="Description of Unknown: Exemplary gene or splice site sequence"
uccgugguaa

SEQ ID NO: 5264 - RNA, 10 nt, Unknown
  source: /note="Description of Unknown: Exemplary gene or splice site sequence"
agaguacuua

SEQ ID NO: 5265 - RNA, 10 nt, Unknown
  source: /note="Description of Unknown: Exemplary gene or splice site sequence"
ggggucagau

SEQ ID NO: 5266 - RNA, 10 nt, Unknown
  source: /note="Description of Unknown: Exemplary gene or splice site sequence"
aagguggacc

SEQ ID NO: 5267 - RNA, 10 nt, Unknown
  source: /note="Description of Unknown: Exemplary gene or splice site sequence"
agagugagcg

SEQ ID NO: 5268 - RNA, 10 nt, Unknown
  source: /note="Description of Unknown: Exemplary gene or splice site sequence"
agagucagau

SEQ ID NO: 5269 - RNA, 10 nt, Unknown
  source: /note="Description of Unknown: Exemplary gene or splice site sequence"
uaaguauuac

SEQ ID NO: 5270 - RNA, 10 nt, Unknown
  source: /note="Description of Unknown: Exemplary gene or splice site sequence"
agaguauuuc

SEQ ID NO: 5271 - RNA, 10 nt, Unknown
  source: /note="Description of Unknown: Exemplary gene or splice site sequence"
agaguucagc

SEQ ID NO: 5272 - RNA, 10 nt, Unknown
  source: /note="Description of Unknown: Exemplary gene or splice site sequence"
auggugaagu

SEQ ID NO: 5273 - RNA, 10 nt, Unknown
  source: /note="Description of Unknown: Exemplary gene or splice site sequence"
uaggugaucc

SEQ ID NO: 5274 - RNA, 10 nt, Unknown
  source: /note="Description of Unknown: Exemplary gene or splice site sequence"
ggaguaagau

SEQ ID NO: 5275 - RNA, 10 nt, Unknown
  source: /note="Description of Unknown: Exemplary gene or splice site sequence"
uagguaccaa

SEQ ID NO: 5276 - RNA, 10 nt, Unknown
  source: /note="Description of Unknown: Exemplary gene or splice site sequence"
agaguugguc

SEQ ID NO: 5277 - RNA, 10 nt, Unknown
  source: /note="Description of Unknown: Exemplary gene or splice site sequence"
gaagugagac

SEQ ID NO: 5278 - RNA, 10 nt, Unknown
  source: /note="Description of Unknown: Exemplary gene or splice site sequence"
aucguagguu

SEQ ID NO: 5279 - RNA, 10 nt, Unknown
  source: /note="Description of Unknown: Exemplary gene or splice site sequence"
gagguacgcu

SEQ ID NO: 5280 - RNA, 10 nt, Unknown
  source: /note="Description of Unknown: Exemplary gene or splice site sequence"
acgguaaggg

SEQ ID NO: 5281 - RNA, 10 nt, Unknown
  source: /note="Description of Unknown: Exemplary gene or splice site sequence"
caggcauguc

SEQ ID NO: 5282 - RNA, 10 nt, Unknown
  source: /note="Description of Unknown: Exemplary gene or splice site sequence"
uuaguaagau

SEQ ID NO: 5283 - RNA, 10 nt, Unknown
  source: /note="Description of Unknown: Exemplary gene or splice site sequence"
ugaguagguu

SEQ ID NO: 5284 - RNA, 10 nt, Unknown
  source: /note="Description of Unknown: Exemplary gene or splice site sequence"
aggguacgaa

SEQ ID NO: 5285 - RNA, 10 nt, Unknown
  source: /note="Description of Unknown: Exemplary gene or splice site sequence"
acgguauguu

SEQ ID NO: 5286 - RNA, 10 nt, Unknown
  source: /note="Description of Unknown: Exemplary gene or splice site sequence"
aggguacugu

SEQ ID NO: 5287 - RNA, 10 nt, Unknown
  source: /note="Description of Unknown: Exemplary gene or splice site sequence"
uugguaugga

SEQ ID NO: 5288 - RNA, 10 nt, Unknown
  source: /note="Description of Unknown: Exemplary gene or splice site sequence"
uaaguaacug

SEQ ID NO: 5289 - RNA, 10 nt, Unknown
  source: /note="Description of Unknown: Exemplary gene or splice site sequence"
gcggucagcc

SEQ ID NO: 5290 - RNA, 10 nt, Unknown
  source: /note="Description of Unknown: Exemplary gene or splice site sequence"
uuugugaguc

SEQ ID NO: 5291 - RNA, 10 nt, Unknown
  source: /note="Description of Unknown: Exemplary gene or splice site sequence"
guggucagug

SEQ ID NO: 5292 - RNA, 10 nt, Unknown
  source: /note="Description of Unknown: Exemplary gene or splice site sequence"
cuggucugua

SEQ ID NO: 5293 - RNA, 10 nt, Unknown
  source: /note="Description of Unknown: Exemplary gene or splice site sequence"
gagguucuua

SEQ ID NO: 5294 - RNA, 10 nt, Unknown
  source: /note="Description of Unknown: Exemplary gene or splice site sequence"
augguacuga

SEQ ID NO: 5295 - RNA, 10 nt, Unknown
  source: /note="Description of Unknown: Exemplary gene or splice site sequence"
aaugugcuuu

SEQ ID NO: 5296 - RNA, 10 nt, Unknown
  source: /note="Description of Unknown: Exemplary gene or splice site sequence"
aggguggcgu

SEQ ID NO: 5297 - RNA, 10 nt, Unknown
  source: /note="Description of Unknown: Exemplary gene or splice site sequence"
ccggcaggaa

SEQ ID NO: 5298 - RNA, 10 nt, Unknown
  source: /note="Description of Unknown: Exemplary gene or splice site sequence"
cauguggguc

SEQ ID NO: 5299 - RNA, 10 nt, Unknown
  source: /note="Description of Unknown: Exemplary gene or splice site sequence"
uugguuuguu

SEQ ID NO: 5300 - RNA, 10 nt, Unknown
  source: /note="Description of Unknown: Exemplary gene or splice site sequence"
cagguucugu

SEQ ID NO: 5301 - RNA, 10 nt, Unknown
  source: /note="Description of Unknown: Exemplary gene or splice site sequence"
acgguaagcg

SEQ ID NO: 5302 - RNA, 10 nt, Unknown
  source: /note="Description of Unknown: Exemplary gene or splice site sequence"
cuggucagua

SEQ ID NO: 5303 - RNA, 10 nt, Unknown
  source: /note="Description of Unknown: Exemplary gene or splice site sequence"
ucaguaggcu

SEQ ID NO: 5304 - RNA, 10 nt, Unknown
  source: /note="Description of Unknown: Exemplary gene or splice site sequence"
ugaguaggac

SEQ ID NO: 5305 - RNA, 10 nt, Unknown
  source: /note="Description of Unknown: Exemplary gene or splice site sequence"
cagguuuuaa

SEQ ID NO: 5306 - RNA, 10 nt, Unknown
  source: /note="Description of Unknown: Exemplary gene or splice site sequence"
gagguguccc

SEQ ID NO: 5307 - RNA, 10 nt, Unknown
  source: /note="Description of Unknown: Exemplary gene or splice site sequence"
aggguggguu

SEQ ID NO: 5308 - RNA, 10 nt, Unknown
  source: /note="Description of Unknown: Exemplary gene or splice site sequence"
guggugagac

SEQ ID NO: 5309 - RNA, 10 nt, Unknown
  source: /note="Description of Unknown: Exemplary gene or splice site sequence"
cacguaggga

SEQ ID NO: 5310 - RNA, 10 nt, Unknown
  source: /note="Description of Unknown: Exemplary gene or splice site sequence"
gugguauuuu

SEQ ID NO: 5311 - RNA, 10 nt, Unknown
  source: /note="Description of Unknown: Exemplary gene or splice site sequence"
gagauauccu

SEQ ID NO: 5312 - RNA, 10 nt, Unknown
  source: /note="Description of Unknown: Exemplary gene or splice site sequence"
aaggugaaca

SEQ ID NO: 5313 - RNA, 10 nt, Unknown
  source: /note="Description of Unknown: Exemplary gene or splice site sequence"
uaaguagggc

SEQ ID NO: 5314 - RNA, 10 nt, Unknown
  source: /note="Description of Unknown: Exemplary gene or splice site sequence"
cuggugcggg

SEQ ID NO: 5315 - RNA, 10 nt, Unknown
  source: /note="Description of Unknown: Exemplary gene or splice site sequence"
cuggucaaua

SEQ ID NO: 5316 - RNA, 10 nt, Unknown
  source: /note="Description of Unknown: Exemplary gene or splice site sequence"
agaguaaaaa

SEQ ID NO: 5317 - RNA, 10 nt, Unknown
  source: /note="Description of Unknown: Exemplary gene or splice site sequence"
aaggugcagu

SEQ ID NO: 5318 - RNA, 10 nt, Unknown
  source: /note="Description of Unknown: Exemplary gene or splice site sequence"
cggguaagca

SEQ ID NO: 5319 - RNA, 10 nt, Unknown
  source: /note="Description of Unknown: Exemplary gene or splice site sequence"
aaagugagcc

SEQ ID NO: 5320 - RNA, 10 nt, Unknown
  source: /note="Description of Unknown: Exemplary gene or splice site sequence"
augguaauca

SEQ ID NO: 5321 - RNA, 10 nt, Unknown
  source: /note="Description of Unknown: Exemplary gene or splice site sequence"
gcaguacgug

SEQ ID NO: 5322 - RNA, 10 nt, Unknown
  source: /note="Description of Unknown: Exemplary gene or splice site sequence"
augguacaug

SEQ ID NO: 5323 - RNA, 10 nt, Unknown
  source: /note="Description of Unknown: Exemplary gene or splice site sequence"
aagguuaaga

SEQ ID NO: 5324 - RNA, 10 nt, Unknown
  source: /note="Description of Unknown: Exemplary gene or splice site sequence"
cggguaaaug

SEQ ID NO: 5325 - RNA, 10 nt, Unknown
  source: /note="Description of Unknown: Exemplary gene or splice site sequence"
gagguucgca

SEQ ID NO: 5326 - RNA, 10 nt, Unknown
  source: /note="Description of Unknown: Exemplary gene or splice site sequence"
gaggcucugg

SEQ ID NO: 5327 - RNA, 10 nt, Unknown
  source: /note="Description of Unknown: Exemplary gene or splice site sequence"
auggugggac

SEQ ID NO: 5328 - RNA, 10 nt, Unknown
  source: /note="Description of Unknown: Exemplary gene or splice site sequence"
aacgugguag

SEQ ID NO: 5329 - RNA, 10 nt, Unknown
  source: /note="Description of Unknown: Exemplary gene or splice site sequence"
aaggugauag

SEQ ID NO: 5330 - RNA, 10 nt, Unknown
  source: /note="Description of Unknown: Exemplary gene or splice site sequence"
gggguuugca

SEQ ID NO: 5331 - RNA, 10 nt, Unknown
  source: /note="Description of Unknown: Exemplary gene or splice site sequence"
cauguaaggg

SEQ ID NO: 5332 - RNA, 10 nt, Unknown
  source: /note="Description of Unknown: Exemplary gene or splice site sequence"
ucaguugagu

SEQ ID NO: 5333 - RNA, 10 nt, Unknown
  source: /note="Description of Unknown: Exemplary gene or splice site sequence"
aaagugcggc

SEQ ID NO: 5334 - RNA, 10 nt, Unknown
  source: /note="Description of Unknown: Exemplary gene or splice site sequence"
agagugagcc

SEQ ID NO: 5335 - RNA, 10 nt, Unknown
  source: /note="Description of Unknown: Exemplary gene or splice site sequence"
auggcaagaa

SEQ ID NO: 5336 - RNA, 10 nt, Unknown
  source: /note="Description of Unknown: Exemplary gene or splice site sequence"
acaguaaggu

SEQ ID NO: 5337 - RNA, 10 nt, Unknown
  source: /note="Description of Unknown: Exemplary gene or splice site sequence"
aaggucucua

SEQ ID NO: 5338 - RNA, 10 nt, Unknown
  source: /note="Description of Unknown: Exemplary gene or splice site sequence"
gugguaaaaa

SEQ ID NO: 5339 - RNA, 10 nt, Unknown
  source: /note="Description of Unknown: Exemplary gene or splice site sequence"
aaaguaggug

SEQ ID NO: 5340 - RNA, 10 nt, Unknown
  source: /note="Description of Unknown: Exemplary gene or splice site sequence"
uaggugcacu

SEQ ID NO: 5341 - RNA, 10 nt, Unknown
  source: /note="Description of Unknown: Exemplary gene or splice site sequence"
gucgugguau

SEQ ID NO: 5342 - RNA, 10 nt, Unknown
  source: /note="Description of Unknown: Exemplary gene or splice site sequence"
cagguauagg

SEQ ID NO: 5343 - RNA, 10 nt, Unknown
  source: /note="Description of Unknown: Exemplary gene or splice site sequence"
ugagugagag

SEQ ID NO: 5344 - RNA, 10 nt, Unknown
  source: /note="Description of Unknown: Exemplary gene or splice site sequence"
acugugagcc

SEQ ID NO: 5345 - RNA, 10 nt, Unknown
  source: /note="Description of Unknown: Exemplary gene or splice site sequence"
aucguuaguu

SEQ ID NO: 5346 - RNA, 10 nt, Unknown
  source: /note="Description of Unknown: Exemplary gene or splice site sequence"
uuuguaccaa

SEQ ID NO: 5347 - RNA, 10 nt, Unknown
  source: /note="Description of Unknown: Exemplary gene or splice site sequence"
ugggugagau

SEQ ID NO: 5348 - RNA, 10 nt, Unknown
  source: /note="Description of Unknown: Exemplary gene or splice site sequence"
agagugagaa

SEQ ID NO: 5349 - RNA, 10 nt, Unknown
  source: /note="Description of Unknown: Exemplary gene or splice site sequence"
agaguagggg

SEQ ID NO: 5350 - RNA, 10 nt, Unknown
  source: /note="Description of Unknown: Exemplary gene or splice site sequence"
agggcaagua

SEQ ID NO: 5351 - RNA, 10 nt, Unknown
  source: /note="Description of Unknown: Exemplary gene or splice site sequence"
cgggucagua

SEQ ID NO: 5352 - RNA, 10 nt, Unknown
  source: /note="Description of Unknown: Exemplary gene or splice site sequence"
uugguaugcc

SEQ ID NO: 5353 - RNA, 10 nt, Unknown
  source: /note="Description of Unknown: Exemplary gene or splice site sequence"
cggguuagau

SEQ ID NO: 5354 - RNA, 10 nt, Unknown
  source: /note="Description of Unknown: Exemplary gene or splice site sequence"
ggggugaagu

SEQ ID NO: 5355 - RNA, 10 nt, Unknown
  source: /note="Description of Unknown: Exemplary gene or splice site sequence"
cccgugugaa

SEQ ID NO: 5356 - RNA, 10 nt, Unknown
  source: /note="Description of Unknown: Exemplary gene or splice site sequence"
gcaguuugga

SEQ ID NO: 5357 - RNA, 10 nt, Unknown
  source: /note="Description of Unknown: Exemplary gene or splice site sequence"
ugcguaagac

SEQ ID NO: 5358 - RNA, 10 nt, Unknown
  source: /note="Description of Unknown: Exemplary gene or splice site sequence"
agagucugua

SEQ ID NO: 5359 - RNA, 10 nt, Unknown
  source: /note="Description of Unknown: Exemplary gene or splice site sequence"
cacgugagca

SEQ ID NO: 5360 - RNA, 10 nt, Unknown
  source: /note="Description of Unknown: Exemplary gene or splice site sequence"
aggguaaaag

SEQ ID NO: 5361 - RNA, 10 nt, Unknown
  source: /note="Description of Unknown: Exemplary gene or splice site sequence"
caggcugggu

SEQ ID NO: 5362 - RNA, 10 nt, Unknown
  source: /note="Description of Unknown: Exemplary gene or splice site sequence"
gaagucuuca

SEQ ID NO: 5363 - RNA, 10 nt, Unknown
  source: /note="Description of Unknown: Exemplary gene or splice site sequence"
aaggcaaaaa

SEQ ID NO: 5364 - RNA, 10 nt, Unknown
  source: /note="Description of Unknown: Exemplary gene or splice site sequence"
guaguaaaua

SEQ ID NO: 5365 - RNA, 10 nt, Unknown
  source: /note="Description of Unknown: Exemplary gene or splice site sequence"
cuagugagag

SEQ ID NO: 5366 - RNA, 10 nt, Unknown
  source: /note="Description of Unknown: Exemplary gene or splice site sequence"
gaaguuucug

SEQ ID NO: 5367 - RNA, 10 nt, Unknown
  source: /note="Description of Unknown: Exemplary gene or splice site sequence"
ccuguacgua

SEQ ID NO: 5368 - RNA, 10 nt, Unknown
  source: /note="Description of Unknown: Exemplary gene or splice site sequence"
gaggugcgcg

SEQ ID NO: 5369 - RNA, 10 nt, Unknown
  source: /note="Description of Unknown: Exemplary gene or splice site sequence"
aagguguaaa

SEQ ID NO: 5370 - RNA, 10 nt, Unknown
  source: /note="Description of Unknown: Exemplary gene or splice site sequence"
ccaguauguu

SEQ ID NO: 5371 - RNA, 10 nt, Unknown
  source: /note="Description of Unknown: Exemplary gene or splice site sequence"
ccggucagcu

SEQ ID NO: 5372 - RNA, 10 nt, Unknown
  source: /note="Description of Unknown: Exemplary gene or splice site sequence"
augguuccug

SEQ ID NO: 5373 - RNA, 10 nt, Unknown
  source: /note="Description of Unknown: Exemplary gene or splice site sequence"
caaguuaaau

SEQ ID NO: 5374 - RNA, 10 nt, Unknown
  source: /note="Description of Unknown: Exemplary gene or splice site sequence"
agaguaggcu

SEQ ID NO: 5375 - RNA, 10 nt, Unknown
  source: /note="Description of Unknown: Exemplary gene or splice site sequence"
auggugggca

SEQ ID NO: 5376 - RNA, 10 nt, Unknown
  source: /note="Description of Unknown: Exemplary gene or splice site sequence"
ggaguaagac

SEQ ID NO: 5377 - RNA, 10 nt, Unknown
  source: /note="Description of Unknown: Exemplary gene or splice site sequence"
agggucacga

SEQ ID NO: 5378 - RNA, 10 nt, Unknown
  source: /note="Description of Unknown: Exemplary gene or splice site sequence"
uaggugauau

SEQ ID NO: 5379 - RNA, 10 nt, Unknown
  source: /note="Description of Unknown: Exemplary gene or splice site sequence"
gaaguaaguc

SEQ ID NO: 5380 - RNA, 10 nt, Unknown
  source: /note="Description of Unknown: Exemplary gene or splice site sequence"
cggguaagau

SEQ ID NO: 5381 - RNA, 10 nt, Unknown
  source: /note="Description of Unknown: Exemplary gene or splice site sequence"
caaguagcua

SEQ ID NO: 5382 - RNA, 10 nt, Unknown
  source: /note="Description of Unknown: Exemplary gene or splice site sequence"
ugaguaaaau

SEQ ID NO: 5383 - RNA, 10 nt, Unknown
  source: /note="Description of Unknown: Exemplary gene or splice site sequence"
gucguacgug

SEQ ID NO: 5384 - RNA, 10 nt, Unknown
  source: /note="Description of Unknown: Exemplary gene or splice site sequence"
augguacgua

SEQ ID NO: 5385 - RNA, 10 nt, Unknown
  source: /note="Description of Unknown: Exemplary gene or splice site sequence"
caggucucgg

SEQ ID NO: 5386 - RNA, 10 nt, Unknown
  source: /note="Description of Unknown: Exemplary gene or splice site sequence"
gaggcauguc

SEQ ID NO: 5387 - RNA, 10 nt, Unknown
  source: /note="Description of Unknown: Exemplary gene or splice site sequence"
agagugggau

SEQ ID NO: 5388 - RNA, 10 nt, Unknown
  source: /note="Description of Unknown: Exemplary gene or splice site sequence"
gugguuagag

SEQ ID NO: 5389 - RNA, 10 nt, Unknown
  source: /note="Description of Unknown: Exemplary gene or splice site sequence"
ugggugguga

SEQ ID NO: 5390 - RNA, 10 nt, Unknown
  source: /note="Description of Unknown: Exemplary gene or splice site sequence"
aagguuaaac

SEQ ID NO: 5391 - RNA, 10 nt, Unknown
  source: /note="Description of Unknown: Exemplary gene or splice site sequence"
cuuguuagcu

SEQ ID NO: 5392 - RNA, 10 nt, Unknown
  source: /note="Description of Unknown: Exemplary gene or splice site sequence"
aaaguaggaa

SEQ ID NO: 5393 - RNA, 10 nt, Unknown
  source: /note="Description of Unknown: Exemplary gene or splice site sequence"
uagguuguau

SEQ ID NO: 5394 - RNA, 10 nt, Unknown
  source: /note="Description of Unknown: Exemplary gene or splice site sequence"
agggugcgcc

SEQ ID NO: 5395 - RNA, 10 nt, Unknown
  source: /note="Description of Unknown: Exemplary gene or splice site sequence"
aaggugggcu

SEQ ID NO: 5396 - RNA, 10 nt, Unknown
  source: /note="Description of Unknown: Exemplary gene or splice site sequence"
uaaguaucug

SEQ ID NO: 5397 - RNA, 10 nt, Unknown
  source: /note="Description of Unknown: Exemplary gene or splice site sequence"
aagguaacgu

SEQ ID NO: 5398 - RNA, 10 nt, Unknown
  source: /note="Description of Unknown: Exemplary gene or splice site sequence"
augguggggc

SEQ ID NO: 5399 - RNA, 10 nt, Unknown
  source: /note="Description of Unknown: Exemplary gene or splice site sequence"
caaguacacg

SEQ ID NO: 5400 - RNA, 10 nt, Unknown
  source: /note="Description of Unknown: Exemplary gene or splice site sequence"
ggcguaagug

SEQ ID NO: 5401 - RNA, 10 nt, Unknown
  source: /note="Description of Unknown: Exemplary gene or splice site sequence"
auaguaggac

SEQ ID NO: 5402 - RNA, 10 nt, Unknown
  source: /note="Description of Unknown: Exemplary gene or splice site sequence"
agagugaggu

SEQ ID NO: 5403 - RNA, 10 nt, Unknown
  source: /note="Description of Unknown: Exemplary gene or splice site sequence"
uuuguaaaaa

SEQ ID NO: 5404 - RNA, 10 nt, Unknown
  source: /note="Description of Unknown: Exemplary gene or splice site sequence"
gaaguuugua

SEQ ID NO: 5405 - RNA, 10 nt, Unknown
  source: /note="Description of Unknown: Exemplary gene or splice site sequence"
cuaguaaucu

SEQ ID NO: 5406 - RNA, 10 nt, Unknown
  source: /note="Description of Unknown: Exemplary gene or splice site sequence"
aagguuuuua

SEQ ID NO: 5407 - RNA, 10 nt, Unknown
  source: /note="Description of Unknown: Exemplary gene or splice site sequence"
gaggugcguu

SEQ ID NO: 5408 - RNA, 10 nt, Unknown
  source: /note="Description of Unknown: Exemplary gene or splice site sequence"
uaggcgagua

SEQ ID NO: 5409 - RNA, 10 nt, Unknown
  source: /note="Description of Unknown: Exemplary gene or splice site sequence"
accgugagua

SEQ ID NO: 5410 - RNA, 10 nt, Unknown
  source: /note="Description of Unknown: Exemplary gene or splice site sequence"
caggucccga

SEQ ID NO: 5411 - RNA, 10 nt, Unknown
  source: /note="Description of Unknown: Exemplary gene or splice site sequence"
augguacugg

SEQ ID NO: 5412 - RNA, 10 nt, Unknown
  source: /note="Description of Unknown: Exemplary gene or splice site sequence"
ugaguucagu

SEQ ID NO: 5413 - RNA, 10 nt, Unknown
  source: /note="Description of Unknown: Exemplary gene or splice site sequence"
aauguguggu

SEQ ID NO: 5414 - RNA, 10 nt, Unknown
  source: /note="Description of Unknown: Exemplary gene or splice site sequence"
uccguugguu

SEQ ID NO: 5415 - RNA, 10 nt, Unknown
  source: /note="Description of Unknown: Exemplary gene or splice site sequence"
caggucagag

SEQ ID NO: 5416 - RNA, 10 nt, Unknown
  source: /note="Description of Unknown: Exemplary gene or splice site sequence"
caggucccua

SEQ ID NO: 5417 - RNA, 10 nt, Unknown
  source: /note="Description of Unknown: Exemplary gene or splice site sequence"
uagguagacu

SEQ ID NO: 5418 - RNA, 10 nt, Unknown
  source: /note="Description of Unknown: Exemplary gene or splice site sequence"
caaguuaagg

SEQ ID NO: 5419 - RNA, 10 nt, Unknown
  source: /note="Description of Unknown: Exemplary gene or splice site sequence"
gaggugugcg

SEQ ID NO: 5420 - RNA, 10 nt, Unknown
  source: /note="Description of Unknown: Exemplary gene or splice site sequence"
gaagcugccc

SEQ ID NO: 5421 - RNA, 10 nt, Unknown
  source: /note="Description of Unknown: Exemplary gene or splice site sequence"
cgaguacgug

SEQ ID NO: 5422 - RNA, 10 nt, Unknown
  source: /note="Description of Unknown: Exemplary gene or splice site sequence"
cggguaggua

SEQ ID NO: 5423 - RNA, 10 nt, Unknown
  source: /note="Description of Unknown: Exemplary gene or splice site sequence"
uugguauuga

SEQ ID NO: 5424 - RNA, 10 nt, Unknown
  source: /note="Description of Unknown: Exemplary gene or splice site sequence"
auuguaugau

SEQ ID NO: 5425 - RNA, 10 nt, Unknown
  source: /note="Description of Unknown: Exemplary gene or splice site sequence"
uugguaugaa

SEQ ID NO: 5426 - RNA, 10 nt, Unknown
  source: /note="Description of Unknown: Exemplary gene or splice site sequence"
gaggugguca

SEQ ID NO: 5427 - RNA, 10 nt, Unknown
  source: /note="Description of Unknown: Exemplary gene or splice site sequence"
gcuguaugaa

SEQ ID NO: 5428 - RNA, 10 nt, Unknown
  source: /note="Description of Unknown: Exemplary gene or splice site sequence"
cagguguugc

SEQ ID NO: 5429 - RNA, 10 nt, Unknown
  source: /note="Description of Unknown: Exemplary gene or splice site sequence"
cagguaaaac

SEQ ID NO: 5430 - RNA, 10 nt, Unknown
  source: /note="Description of Unknown: Exemplary gene or splice site sequence"
auaguaaggu

SEQ ID NO: 5431 - RNA, 10 nt, Unknown
  source: /note="Description of Unknown: Exemplary gene or splice site sequence"
cugguuagag

SEQ ID NO: 5432 - RNA, 10 nt, Unknown
  source: /note="Description of Unknown: Exemplary gene or splice site sequence"
agcgugugag

SEQ ID NO: 5433 - RNA, 10 nt, Unknown
  source: /note="Description of Unknown: Exemplary gene or splice site sequence"
aagguuaucu

SEQ ID NO: 5434 - RNA, 10 nt, Unknown
  source: /note="Description of Unknown: Exemplary gene or splice site sequence"
cacgugagua

SEQ ID NO: 5435 - RNA, 10 nt, Unknown
  source: /note="Description of Unknown: Exemplary gene or splice site sequence"
agggucagua

SEQ ID NO: 5436 - RNA, 10 nt, Unknown
  source: /note="Description of Unknown: Exemplary gene or splice site sequence"
gagguauaau

SEQ ID NO: 5437 - RNA, 10 nt, Unknown
  source: /note="Description of Unknown: Exemplary gene or splice site sequence"
cagguuauuu

SEQ ID NO: 5438 - RNA, 10 nt, Unknown
  source: /note="Description of Unknown: Exemplary gene or splice site sequence"
aggguggacu

SEQ ID NO: 5439 - RNA, 10 nt, Unknown
  source: /note="Description of Unknown: Exemplary gene or splice site sequence"
auuguaauuc

SEQ ID NO: 5440 - RNA, 10 nt, Unknown
  source: /note="Description of Unknown: Exemplary gene or splice site sequence"
uuuguggguu

SEQ ID NO: 5441 - RNA, 10 nt, Unknown
  source: /note="Description of Unknown: Exemplary gene or splice site sequence"
augguacgug

SEQ ID NO: 5442 - RNA, 10 nt, Unknown
  source: /note="Description of Unknown: Exemplary gene or splice site sequence"
aagguguucc

SEQ ID NO: 5443 - RNA, 10 nt, Unknown
  source: /note="Description of Unknown: Exemplary gene or splice site sequence"
caggugacgc

SEQ ID NO: 5444 - RNA, 10 nt, Unknown
  source: /note="Description of Unknown: Exemplary gene or splice site sequence"
gagguacuaa

SEQ ID NO: 5445 - RNA, 10 nt, Unknown
  source: /note="Description of Unknown: Exemplary gene or splice site sequence"
acaguucagu

SEQ ID NO: 5446 - RNA, 10 nt, Unknown
  source: /note="Description of Unknown: Exemplary gene or splice site sequence"
gaggucacgg

SEQ ID NO: 5447 - RNA, 10 nt, Unknown
  source: /note="Description of Unknown: Exemplary gene or splice site sequence"
caaguaaggc

SEQ ID NO: 5448 - RNA, 10 nt, Unknown
  source: /note="Description of Unknown: Exemplary gene or splice site sequence"
aagguuuggg

SEQ ID NO: 5449 - RNA, 10 nt, Unknown
  source: /note="Description of Unknown: Exemplary gene or splice site sequence"
aaagugggcu

SEQ ID NO: 5450 - RNA, 10 nt, Unknown
  source: /note="Description of Unknown: Exemplary gene or splice site sequence"
gcgguucuug

SEQ ID NO: 5451 - RNA, 10 nt, Unknown
  source: /note="Description of Unknown: Exemplary gene or splice site sequence"
gagguggagc

SEQ ID NO: 5452 - RNA, 10 nt, Unknown
  source: /note="Description of Unknown: Exemplary gene or splice site sequence"
ugagucagug

SEQ ID NO: 5453 - RNA, 10 nt, Unknown
  source: /note="Description of Unknown: Exemplary gene or splice site sequence"
caggucaagg

SEQ ID NO: 5454 - RNA, 10 nt, Unknown
  source: /note="Description of Unknown: Exemplary gene or splice site sequence"
aguguaagcu

SEQ ID NO: 5455 - RNA, 10 nt, Unknown
  source: /note="Description of Unknown: Exemplary gene or splice site sequence"
gaggcagaaa

SEQ ID NO: 5456 - RNA, 10 nt, Unknown
  source: /note="Description of Unknown: Exemplary gene or splice site sequence"
aaggucacac

SEQ ID NO: 5457 - RNA, 10 nt, Unknown
  source: /note="Description of Unknown: Exemplary gene or splice site sequence"
gaaguagguu

SEQ ID NO: 5458 - RNA, 10 nt, Unknown
  source: /note="Description of Unknown: Exemplary gene or splice site sequence"
gucguaaguu

SEQ ID NO: 5459 - RNA, 10 nt, Unknown
  source: /note="Description of Unknown: Exemplary gene or splice site sequence"
agaguaugca

SEQ ID NO: 5460 - RNA, 10 nt, Unknown
  source: /note="Description of Unknown: Exemplary gene or splice site sequence"
ccugugcaaa

SEQ ID NO: 5461 - RNA, 10 nt, Unknown
  source: /note="Description of Unknown: Exemplary gene or splice site sequence"
acggugaaaa

SEQ ID NO: 5462 - RNA, 10 nt, Unknown
  source: /note="Description of Unknown: Exemplary gene or splice site sequence"
cagguacgaa

SEQ ID NO: 5463 - RNA, 10 nt, Unknown
  source: /note="Description of Unknown: Exemplary gene or splice site sequence"
caugugagga

SEQ ID NO: 5464 - RNA, 10 nt, Unknown
  source: /note="Description of Unknown: Exemplary gene or splice site sequence"
agcgugagua

SEQ ID NO: 5465 - RNA, 10 nt, Unknown
  source: /note="Description of Unknown: Exemplary gene or splice site sequence"
gguguguagg

SEQ ID NO: 5466 - RNA, 10 nt, Unknown
  source: /note="Description of Unknown: Exemplary gene or splice site sequence"
aacgugagcu

SEQ ID NO: 5467 - RNA, 10 nt, Unknown
  source: /note="Description of Unknown: Exemplary gene or splice site sequence"
gaggugaacu

SEQ ID NO: 5468 - RNA, 10 nt, Unknown
  source: /note="Description of Unknown: Exemplary gene or splice site sequence"
agaguucagu

SEQ ID NO: 5469 - RNA, 10 nt, Unknown
  source: /note="Description of Unknown: Exemplary gene or splice site sequence"
aacgugugua

SEQ ID NO: 5470 - RNA, 10 nt, Unknown
  source: /note="Description of Unknown: Exemplary gene or splice site sequence"
cagguugugg

SEQ ID NO: 5471 - RNA, 10 nt, Unknown
  source: /note="Description of Unknown: Exemplary gene or splice site sequence"
aagguacuag

SEQ ID NO: 5472 - RNA, 10 nt, Unknown
  source: /note="Description of Unknown: Exemplary gene or splice site sequence"
ucagugaaaa

SEQ ID NO: 5473 - RNA, 10 nt, Unknown
  source: /note="Description of Unknown: Exemplary gene or splice site sequence"
aaugucuggu

SEQ ID NO: 5474 - RNA, 10 nt, Unknown
  source: /note="Description of Unknown: Exemplary gene or splice site sequence"
acgguaaaau

SEQ ID NO: 5475 - RNA, 10 nt, Unknown
  source: /note="Description of Unknown: Exemplary gene or splice site sequence"
cugguguaag

SEQ ID NO: 5476 - RNA, 10 nt, Unknown
  source: /note="Description of Unknown: Exemplary gene or splice site sequence"
gaggugcgaa

SEQ ID NO: 5477 - RNA, 10 nt, Unknown
  source: /note="Description of Unknown: Exemplary gene or splice site sequence"
aggguuucuc

SEQ ID NO: 5478 - RNA, 10 nt, Unknown
  source: /note="Description of Unknown: Exemplary gene or splice site sequence"
cagguagccc

SEQ ID NO: 5479 - RNA, 10 nt, Unknown
  source: /note="Description of Unknown: Exemplary gene or splice site sequence"
auuguauugg

SEQ ID NO: 5480 - RNA, 10 nt, Unknown
  source: /note="Description of Unknown: Exemplary gene or splice site sequence"
augguacuua

SEQ ID NO: 5481 - RNA, 10 nt, Unknown
  source: /note="Description of Unknown: Exemplary gene or splice site sequence"
gaggcccgac

SEQ ID NO: 5482 - RNA, 10 nt, Unknown
  source: /note="Description of Unknown: Exemplary gene or splice site sequence"
ucgguaagac

SEQ ID NO: 5483 - RNA, 10 nt, Unknown
  source: /note="Description of Unknown: Exemplary gene or splice site sequence"
cgggcuguag

SEQ ID NO: 5484 - RNA, 10 nt, Unknown
  source: /note="Description of Unknown: Exemplary gene or splice site sequence"
uaugugugug

SEQ ID NO: 5485 - RNA, 10 nt, Unknown
  source: /note="Description of Unknown: Exemplary gene or splice site sequence"
uagguagaaa

SEQ ID NO: 5486 - RNA, 10 nt, Unknown
  source: /note="Description of Unknown: Exemplary gene or splice site sequence"
guggucauua

SEQ ID NO: 5487 - RNA, 10 nt, Unknown
  source: /note="Description of Unknown: Exemplary gene or splice site sequence"
uaggugaaag

SEQ ID NO: 5488 - RNA, 10 nt, Unknown
  source: /note="Description of Unknown: Exemplary gene or splice site sequence"
acuguaauuc

SEQ ID NO: 5489 - RNA, 10 nt, Unknown
  source: /note="Description of Unknown: Exemplary gene or splice site sequence"
gcaguacagg

SEQ ID NO: 5490 - RNA, 10 nt, Unknown
  source: /note="Description of Unknown: Exemplary gene or splice site sequence"
ucggugaguc

SEQ ID NO: 5491 - RNA, 10 nt, Unknown
  source: /note="Description of Unknown: Exemplary gene or splice site sequence"
uauguaggga

SEQ ID NO: 5492 - RNA, 10 nt, Unknown
  source: /note="Description of Unknown: Exemplary gene or splice site sequence"
augguauguc

SEQ ID NO: 5493 - RNA, 10 nt, Unknown
  source: /note="Description of Unknown: Exemplary gene or splice site sequence"
guggugugug

SEQ ID NO: 5494 - RNA, 10 nt, Unknown
  source: /note="Description of Unknown: Exemplary gene or splice site sequence"
cuggugaccu

SEQ ID NO: 5495 - RNA, 10 nt, Unknown
  source: /note="Description of Unknown: Exemplary gene or splice site sequence"
aaugugaaua

SEQ ID NO: 5496 - RNA, 10 nt, Unknown
  source: /note="Description of Unknown: Exemplary gene or splice site sequence"
uaggucucac

SEQ ID NO: 5497 - RNA, 10 nt, Unknown
  source: /note="Description of Unknown: Exemplary gene or splice site sequence"
gagguuauug

SEQ ID NO: 5498 - RNA, 10 nt, Unknown
  source: /note="Description of Unknown: Exemplary gene or splice site sequence"
ugaguaggcu

SEQ ID NO: 5499 - RNA, 10 nt, Unknown
  source: /note="Description of Unknown: Exemplary gene or splice site sequence"
cgggcacgua

SEQ ID NO: 5500 - RNA, 10 nt, Unknown
  source: /note="Description of Unknown: Exemplary gene or splice site sequence"
gcaguaaaua

SEQ ID NO: 5501 - RNA, 10 nt, Unknown
  source: /note="Description of Unknown: Exemplary gene or splice site sequence"
ccggugagag

SEQ ID NO: 5502 - RNA, 10 nt, Unknown
  source: /note="Description of Unknown: Exemplary gene or splice site sequence"
uaaguugguc

SEQ ID NO: 5503 - RNA, 10 nt, Unknown
  source: /note="Description of Unknown: Exemplary gene or splice site sequence"
ccggugagcc

SEQ ID NO: 5504 - RNA, 10 nt, Unknown
  source: /note="Description of Unknown: Exemplary gene or splice site sequence"
aagguuguca

SEQ ID NO: 5505 - RNA, 10 nt, Unknown
  source: /note="Description of Unknown: Exemplary gene or splice site sequence"
cugguauuau

SEQ ID NO: 5506 - RNA, 10 nt, Unknown
  source: /note="Description of Unknown: Exemplary gene or splice site sequence"
gggguauggg

SEQ ID NO: 5507 - RNA, 10 nt, Unknown
  source: /note="Description of Unknown: Exemplary gene or splice site sequence"
aaagucagua

SEQ ID NO: 5508 - RNA, 10 nt, Unknown
  source: /note="Description of Unknown: Exemplary gene or splice site sequence"
uuuguaugua

SEQ ID NO: 5509 - RNA, 10 nt, Unknown
  source: /note="Description of Unknown: Exemplary gene or splice site sequence"
uaaguacugc

SEQ ID NO: 5510 - RNA, 10 nt, Unknown
  source: /note="Description of Unknown: Exemplary gene or splice site sequence"
cagguaccaa

SEQ ID NO: 5511 - RNA, 10 nt, Unknown
  source: /note="Description of Unknown: Exemplary gene or splice site sequence"
gaaguucaga

SEQ ID NO: 5512 - RNA, 10 nt, Unknown
  source: /note="Description of Unknown: Exemplary gene or splice site sequence"
auggugcggu

SEQ ID NO: 5513 - RNA, 10 nt, Unknown
  source: /note="Description of Unknown: Exemplary gene or splice site sequence"
guggugaggu

SEQ ID NO: 5514 - RNA, 10 nt, Unknown
  source: /note="Description of Unknown: Exemplary gene or splice site sequence"
ugaguaagcc

SEQ ID NO: 5515 - RNA, 10 nt, Unknown
  source: /note="Description of Unknown: Exemplary gene or splice site sequence"
uauguaaggg

SEQ ID NO: 5516 - RNA, 10 nt, Unknown
  source: /note="Description of Unknown: Exemplary gene or splice site sequence"
gugguggaaa

SEQ ID NO: 5517 - RNA, 10 nt, Unknown
  source: /note="Description of Unknown: Exemplary gene or splice site sequence"
gaggugauug

SEQ ID NO: 5518 - RNA, 10 nt, Unknown
  source: /note="Description of Unknown: Exemplary gene or splice site sequence"
ggaguuugua

SEQ ID NO: 5519 - RNA, 10 nt, Unknown
  source: /note="Description of Unknown: Exemplary gene or splice site sequence"
aaggucacga

SEQ ID NO: 5520 - RNA, 10 nt, Unknown
  source: /note="Description of Unknown: Exemplary gene or splice site sequence"
gugguagagg

SEQ ID NO: 5521 - RNA, 10 nt, Unknown
  source: /note="Description of Unknown: Exemplary gene or splice site sequence"
uaaguauauc

SEQ ID NO: 5522 - RNA, 10 nt, Unknown
  source: /note="Description of Unknown: Exemplary gene or splice site sequence"
aaggugucca

SEQ ID NO: 5523 - RNA, 10 nt, Unknown
  source: /note="Description of Unknown: Exemplary gene or splice site sequence"
uaugugguau

SEQ ID NO: 5524 - RNA, 10 nt, Unknown
  source: /note="Description of Unknown: Exemplary gene or splice site sequence"
gagguacaau

SEQ ID NO: 5525 - RNA, 10 nt, Unknown
  source: /note="Description of Unknown: Exemplary gene or splice site sequence"
aagguggggg

SEQ ID NO: 5526 - RNA, 10 nt, Unknown
  source: /note="Description of Unknown: Exemplary gene or splice site sequence"
ggaguaggug

SEQ ID NO: 5527 - RNA, 10 nt, Unknown
  source: /note="Description of Unknown: Exemplary gene or splice site sequence"
uaggugacuu

SEQ ID NO: 5528 - DNA, 22 bp, Artificial Sequence
  source: /note="Description of Artificial Sequence: Synthetic primer"
tcctcctgagaaagagaaggac

SEQ ID NO: 5529 - DNA, 19 bp, Artificial Sequence
  source: /note="Description of Artificial Sequence: Synthetic primer"
gcctggagatccagactca

SEQ ID NO: 5530 - DNA, 24 bp, Artificial Sequence
  source: /note="Description of Artificial Sequence: Synthetic probe"
tggcaacccttgaggccctgtcct

SEQ ID NO: 5531 - DNA, 23 bp, Artificial Sequence
  source: /note="Description of Artificial Sequence: Synthetic primer"
tcctgagaaagagaaggacattg

SEQ ID NO: 5532 - DNA, 21 bp, Artificial Sequence
  source: /note="Description of Artificial Sequence: Synthetic primer"
ctgtgggctcctgtagaaatc

SEQ ID NO: 5533 - DNA, 16 bp, Artificial Sequence
  source: /note="Description of Artificial Sequence: Synthetic probe"
ttgagaggcaagccct
